(19) United States
(12) Patent Application Publication
(10) Pub. No.: US 2003/0082596 A1
(43) Pub. Date: May 1, 2003

(54) Methods of genetic analysis of probes: test3

(76) Inventor: Michael Mittmann, Palo Alto, CA (US)

Correspondence Address: Alison B. Mohr, Parsons Behle & Latimer, One Utah Center, 201 South Main Street, Suite 1800, Salt Lake City, UT, 84145-0898, US

(21) Appl. No.: 10/215,112

(22) Filed: Aug. 8, 2002

Related U.S. Application Data
(60) Provisional application No. 60/311,040, filed on Aug. 8, 2001.

(51) Int. Cl. C12Q 1/68; C12M 1/34

(52) U.S. Cl. 435/6; 435/287.2

(57) ABSTRACT

Nucleic acid sequences that are complementary, in one embodiment, to a wide variety of sequences, such as bioB, bioC, bioD, cre, dap, lys, phe, thr, trp, human actin, human GAPDH, human transferrin receptor, human transcription factor ISGF-3, human 18S rRNA, human 28S rRNA, human alu, murine actin, murine GAPDH, murine tranferrin receptor, murine pyruvate carboxylase, murine B1/B2 repetitive elements, murine 18S rRNA, rat actin, rat GAPDH, rat hexokinase, rat 5S rRNA, rat B1/B2 repetitive elements, yeast actin, yeast TATA binding factor, yeast RNA polymerase II, yeast 18S rRNA and yeast 25S RNA sequences are provided. The sequences are provided in such a way as to make them available for a variety of analyses. As such, they are related to diverse fields impacted by the nature of molecular interaction, including chemistry, biology, medicine, and medical diagnostics.

### RELATED APPLICATIONS

[0001] This application claims priority to Provisional Application Serial No. 60/311,040 filed Aug. 8, 2001, which is herein incorporated by reference in its entirety for all purposes.

### REFERENCE TO SEQUENCE LISTING

[0002] The sequence listing, including SEQ ID NOS: 1-14396, is contained on compact disc in two copies, labeled Copy 1 and Copy 2. The computer readable form is on a compact disc labeled CRF. The file name on each of the three compact discs is seqlist.rtf. The sequence listing information recorded in the computer readable form is identical to the written compact disc sequence listing. The sequence listing is hereby incorporated in this application in its entirety and is to be considered part of the disclosure of this specification.

### BACKGROUND OF THE INVENTION

[0003] The present inventions provide a unique pool of nucleic acid sequences useful for analyzing molecular interactions of biological interest. The inventions therefore relate to diverse fields impacted by the nature of molecular interaction, including chemistry, biology, medicine, and medical diagnostics.

### FIELD OF THE INVENTION

[0004] Many biological functions are carried out by regulating the expression levels of various genes, either through changes in levels of transcription (e.g. through control of initiation, provision of RNA precursors, RNA processing, etc.) of particular genes, through changes in the copy number of the genetic DNA, or through changes in protein synthesis. For example, control of the cell cycle and cell differentiation, as well as diseases, are characterized by the variations in the transcription levels of a group of genes.

[0005] Gene expression is not only responsible for physiological functions, but is also associated with pathogenesis. For example, the lack of sufficient functional tumor suppressor genes and/or the over expression of oncogene/protooncogenes leads to tumorgenesis. (See, e.g., Marshall, Cell, 64:313-326 (1991) and Weinberg, Science, 254:1138-1146 (1991)). Thus, changes in the expression levels of particular genes (e.g. oncogenes or tumor suppressors), serve as signposts for the presence and progression of various diseases.

[0006] As a consequence, novel techniques and apparatus are needed to study gene expression in specific biological systems.

[0007] All documents, i.e., publications and patent applications, cited in this disclosure, including the foregoing, are incorporated by reference herein in their entireties for all purposes to the same extent as if each of the individual documents were specifically and individually indicated to be so incorporated by reference herein in its entirety.

### SUMMARY OF THE INVENTION

[0008] The inventions provide nucleic acid sequences that are complementary to particular genes and makes them available for a variety of analyses, including, for example, gene expression analysis. For example, one embodiment the inventions comprises an array comprising of any 10 or more, 100 or more, 1000 or more, 10,000 or more or 100,000 or more nucleic acid probes containing nine or more consecutive nucleotides from the sequences listed in SEQ ID NOS: 1-14396, or the perfect match, perfect mismatch, antisense match or antisense mismatch thereof. In a further embodiment, the inventions comprise the use of any of the above arrays or fragments disclosed in SEQ ID NOS: 1-14396 to: monitor gene expression levels by hybridization of the array to a DNA library; monitor gene expression levels by hybridization to an mRNA-protein fusion compound; identify polymorphisms; identify biallelic markers; produce genetic maps; analyze genetic variation; comparatively analyze gene expression between different species; analyze gene knockouts; or to hybridize tag-labeled compounds. In a further embodiment the inventions comprises a method of analysis comprising of hybridizing one or more pools of nucleic acids to two or more of the fragments disclosed in SEQ ID NOS: 1-14396 and detecting said hybridization. In a further embodiment the inventions comprises the use of any one or more of the fragments disclosed in SEQ ID NOS: 1-14396 as a primer for polymerase chain reaction (PCR). In a further embodiment the inventions comprises the use of any one or more of the fragments disclosed in SEQ ID NOS: 1-14396 as a ligand.

### DETAILED DESCRIPTION OF THE INVENTION

[0009] I. Definitions

[0010] Massive Parallel Screening: The phrase “massively parallel screening” refers to the simultaneous screening of at least about 100, preferably about 1000, more preferably about 10,000 and more preferably about 100,000 different nucleic acid hybridizations.

[0011] Nucleic Acid: The terms “nucleic acid” or “nucleic acid molecule” refers to a deoxyribonucleotide or ribonucleotide polymer in either single-or double-stranded form, and unless otherwise limited, would encompass analogs of natural nucleotides that can function in a similar manner as naturally occurring nucleotides. Nucleic acids may be derived from a variety or sources including, but not limited to, naturally occurring nucleic acids, clones, synthesis in solution or solid phase synthesis.

[0012] Probe: As used herein a “probe” is defined as a nucleic acid capable of binding to a target nucleic acid of complementary sequence through one or more types of chemical bonds, usually through complementary base pairing, usually through hydrogen bond formation. As used herein, a probe may include natural (i.e. A, G, U, C, or T) or modified bases (7-deazaguanosine, inosine, etc.). In addition, the bases in probes may be joined by a linkage other than a phosphodiester bond, so long as it does not interfere with hybridization. Thus, probes may be peptide nucleic acids in which the constituent bases are joined by peptide bonds rather than phosphodiester linkages.

[0013] Target nucleic acid: The term “target nucleic acid” or “target sequence” refers to a nucleic acid or nucleic acid sequence that is to be analyzed. A target can be a nucleic acid to which a probe will hybridize. The probe may or may not be specifically designed to hybridize to the target. It is either the presence or absence of the target nucleic acid that is to be detected, or the amount of the target nucleic acid that is to be quantified. The term target nucleic acid may refer to the specific subsequence of a larger nucleic acid to which the probe is directed or to the overall sequence (e.g., gene or mRNA) whose expression level it is desired to detect. The difference in usage will be apparent from context.

[0014] mRNA or transcript: The term “mRNA” refers to transcripts of a gene. Transcripts are RNA including, for example, mature messenger RNA ready for transaction, products of various stages of transcript processing. Transcript processing may include splicing, editing and degradation.

[0015] Subsequence: “Subsequence” refers to a sequence of nucleic acids that comprise a part of a longer sequence of nucleic acids.

[0016] Perfect match: The term “match,” “perfect match,” “perfect match probe” or “perfect match control” refers to a nucleic acid that has a sequence that is designed to be perfectly complementary to a particular target sequence. The nucleic acid is typically perfectly complementary to a portion (subsequence) of the target sequence. A perfect match (PM) probe can be a “test probe”, a “normalization control” probe, an expression level control probe and the like. A perfect match control or perfect match is, however, distinguished from a “mismatch” or “mismatch probe.”

[0017] Mismatch: The term “mismatch,” “mismatch control” or “mismatch probe” refers to a nucleic acid whose sequence is deliberately selected not to be perfectly complementary to a particular target sequence. As a non-limiting example, for each mismatch (MM) control in a high-density probe array there typically exists a corresponding perfect match (PM) probe that is perfectly complementary to the same particular target sequence. The mismatch may comprise one or more bases. While the mismatch(es) may be located anywhere in the mismatch probe, terminal mismatches are less desirable because a terminal mismatch is less likely to prevent hybridization of the target sequence. In a particularly preferred embodiment, the mismatch is located at or near the center of the probe such that the mismatch is most likely to destabilize the duplex with the target sequence under the test hybridization conditions. A homo-mismatch substitutes an adenine (A) for a thymine (T) and vice versa and a guanine (G) for a cytosine (C) and vice versa. For example, if the target sequence was AGGTCCA, a probe designed with a single homo-mismatch at the central, or fourth position, would result in the following sequence: TCCTGGT.

[0018] Array: An “array” is a solid support with at least a first surface having a plurality of different nucleic acid sequences attached to the first surface.

[0019] Gene Knockout: the term “gene knockout,” as defined in Lodish et al. Molecular Cell Biology 3^{rd} Edition, Scientific American Books pub., which is hereby incorporated in its entirety for all purposes is, is a technique for selectively inactivating a gene by replacing it with a mutant allele in an otherwise normal organism.

[0020] DNA Library: as used herein the term “genomic library” or “genomic DNA library” refers to a collection of cloned DNA molecules consisting of fragments of the entire genome (genomic library) or of DNA copies of all the mRNA produced by a cell type (cDNA library) inserted into a suitable cloning vector.

[0021] Polymorphism: a “polymorphism” refers to the occurrence of two or more genetically determined alternative sequences or alleles in a population. A polymorphic marker or site is the locus at which divergence occurs. Preferred markers have at least two alleles, each occurring at a frequency of greater than 1%, and more preferably greater than 10% or 20% of the selected population. A polymorphic locus may be as small as one base pair. Polymorphic markers include restriction fragment length polymorphisms, variable number or tandem repeats (VNTR's), hypervariable regions, minisatellites, dinucleotide repeats, trinucleotide repeats, tetranucleotide repeats, simple sequence repeats, and insertion elements such as ALU. The first identified allelic form is arbitrarily designated as the reference form and other allelic forms are designated as alternative or variant alleles. The allelic form occurring most frequently in a selected population is sometimes referred to as the wildtype form. Diploid organisms may be homozygous or heterozygous for allelic forms. A diallelic or biallelic polymorphism has two forms. A triallelic polymorphism has three forms.

[0022] Genetic map: a map which presents the order of specific sequences on a chromosome.

[0023] Genetic variation: refers to variation in the sequence of the same region between two or more organisms.

[0024] Hybridization: the association of two complementary nucleic acid strands or their derivatives (such as PNA) to form double stranded molecules. Hybrids can contain two DNA strands, two RNA strands, or one DNA and one RNA strand.

[0025] mRNA-protein fusion: a compound whereby an mRNA is directly attached to the peptide or protein it incodes by a stable covalent linkage.

[0026] Ligand: any molecule, other than an enzyme substrate, that binds tightly and specifically to a macromolecule, for example, a protein, forming a macromolecule-ligand complex.

[0027] II. General

[0028] SEQ ID NOS: 1-14396, encompassed in the Sequence Listing, presents target sequences included in the inventions. Each target sequence corresponds to and represents at least four additional nucleic acid sequences included in the inventions. For example, the first nucleic acid sequence listed in SEQ ID NOS: 1-14396 is: 5′-aggacttgccatcgtagaactgctg-3′ the additional sequences included in the inventions that are represented by this nucleic acid sequence are, for example:

3′-tcctgaacggtagcatcttgacgac-5′ = (perfect) sense
match
3′-tcctgaacggtaccatcttgacgac-5′ = sense mismatch
3′-aggacttgccatcgtagaactgctg-5′ = (perfect) anti-
sense match
3′-aggacttgccatggtagaactgctg-5′ = antisense mis-
match

[0029] Accordingly, for each nucleic acid sequence listed in SEQ ID NOS: 1-14396, this disclosure includes the corresponding sense match, sense mismatch, antisense match and antisense mismatch. The position of the mismatch is not limited to the above example, it may be located anywhere in the nucleic acid sequence and may comprise one or more bases.

[0030] Consequently, the present inventions includes: a) the target sequences listed in SEQ ID NOS: 1-14396, or the sense match, sense mismatch, antisense match or antisense mismatch thereof; b) clones that comprise the target nucleic acid sequences listed in SEQ ID NOS: 1-14396, or the sense match, sense mismatch, antisense match or antisense mismatch thereof; c) longer nucleotide sequences that include the nucleic acid sequences listed in SEQ ID NOS: 1-14396, or the sense match, sense mismatch, antisense match or antisense mismatch thereof and d) subsequences greater than nine nucleotides in length of the target nucleic acid sequences listed in SEQ ID NOS: 1-14396, or the sense match, sense mismatch, antisense match or antisense mismatch.

[0031] Target sequences were chosen from clusters of known sequences, such as bioB, bioC, bioD, cre, dap, lys, phe, thr, trp, human actin, human GAPDH, human transferrin receptor, human transcription factor ISGF-3, human 18S rRNA, human 28S rRNA, human alu, murine actin, murine GAPDH, murine tranferrin receptor, murine pyruvate carboxylase, murine B1/B2 repetitive elements, murine 18S rRNA, rat actin, rat GAPDH, rat hexokinase, rat 5S rRNA, rat B1/B2 repetitive elements, yeast actin, yeast TATA binding factor, yeast RNA polymerase II, yeast 18S rRNA and yeast 25S RNA sequences. Target sequences were selected using the computer based methods described in U.S. Pat. No. 6,309,822 incorporated herein by reference for all purposes.

[0032] The present inventions provide a pool of unique nucleotide sequences complementary to sequences, such as bioB, bioC, bioD, cre, dap, lys, phe, thr, trp, human actin, human GAPDH, human transferrin receptor, human transcription factor ISGF-3, human 18S rRNA, human 28S rRNA, human alu, murine actin, murine GAPDH, murine tranferrin receptor, murine pyruvate carboxylase, murine B1/B2 repetitive elements, murine 18S rRNA, rat actin, rat GAPDH, rat hexokinase, rat 5S rRNA, rat B1/B2 repetitive elements, yeast actin, yeast TATA binding factor, yeast RNA polymerase II, yeast 18S rRNA and yeast 25S RNA sequences in particular embodiments which alone, or in combinations of two or more, 10 or more, 100 or more, 1,000 or more, 10,000 or more, or 100,000 or more, can be used for a variety of applications.

[0033] In one embodiment, the present inventions provide for a pool of unique nucleotide sequences which are complementary to approximately 14396 sequences, such as bioB, bioC, bioD, cre, dap, lys, phe, thr, trp, human actin, human GAPDH, human transferrin receptor, human transcription factor ISGF-3, human 18S rRNA, human 28S rRNA, human alu, murine actin, murine GAPDH, murine tranferrin receptor, murine pyruvate carboxylase, murine B1/B2 repetitive elements, murine 18S rRNA, rat actin, rat GAPDH, rat hexokinase, rat 5S rRNA, rat B1/B2 repetitive elements, yeast actin, yeast TATA binding factor, yeast RNA polymerase II, yeast 18S rRNA and yeast 25S RNA sequences formed into a high density array of probes suitable for array based massive parallel gene expression. Array based methods for monitoring gene expression are disclosed and discussed in detail in U.S. Pat. No. 5,800,992, U.S. Pat. No. 6,309,822, and PCT Application WO 92/10588 (published on Jun. 25, 1992), all of which are incorporated herein by reference for all purposes. Generally those methods of monitoring gene expression involve (1) providing a pool of target nucleic acids comprising RNA transcript(s) of one or more target gene(s), or nucleic acids derived from the RNA transcript(s); (2) hybridizing the nucleic acid sample to a high density array of probes and (3) detecting the hybridized nucleic acids and calculating a relative expression (transcription, RNA processing or degradation) level.

[0034] The development of Very Large Scale Immobilized Polymer Synthesis or VLSIPS™ technology has provided methods for making very large arrays of nucleic acid probes in very small arrays. See U.S. Pat. No. 5,143,854 and PCT Patent Publication Nos. WO 90/15070 and WO 92/10092, and Fodor et al., Science, 251, 767-77 (1991), each of which is incorporated herein by reference. U.S. patent application Ser. No. 08/670,118, describes methods for making arrays of nucleic acid probes that can be used to detect the presence of a nucleic acid containing a specific nucleotide sequence. Methods of forming high density arrays of nucleic acids, peptides and other polymer sequences with a minimal number of synthetic steps are known. The nucleic acid array can be synthesized on a solid substrate by a variety of methods, including, but not limited to, light-directed chemical coupling and mechanically directed coupling. In a preferred detection method, the array of immobilized nucleic acids, or probes, is contacted with a sample containing target nucleic acids, to which a flourescent label is attached. Target nucleic acids hybridize to the probes on the array and any nonhybridized nucleic acids are removed. The array containing the hybridized target nucleic acids are exposed to light which excites the flourescent label. The resulting flourescent intensity, or brightness, is detected. Relative brightness is used to determine which probe is the best candidate for the perfect match to the hybridized target nucleic acid because flourescent intensity (brightness) corresponds to binding affinity. Once the position of the perfect match probe is known, the sequence of the hybridized target nucleic is known because the sequence and position of the probe is known.

[0035] In the array of the present inventions the probes are presented in pairs, one probe in each pair being a perfect match to the target sequence and the other probe being identical to the perfect match probe except that the central base is a homo-mismatch. Mismatch probes provide a control for non-specific binding or cross-hybridization to a nucleic acid in the sample other than the target to which the probe is directed. Thus, mismatch probes indicate whether a hybridization is or is not specific. For example, if the target is present, the perfect match probes should be consistently brighter than the mismatch probes because fluorescence intensity, or brightness, corresponds to binding affinity. (See, for example U.S. Pat. No. 5,324,633, which is incorporated herein for all purposes.) In addition, if all central mismatches are present, the mismatch probes can be used to detect a mutation. Finally the difference in intensity between the perfect match and the mismatch probe (I(PM)-I(MM)) provides a good measure of the concentration of the hybridized material. See pending PCT Application No. 98/11223, which is incorporated herein by reference for all purposes. The probe pairs are presented in both sense and antisense orientation, thereby eliciting a total of four probes per target sequence: sense match, sense mismatch, antisense match and antisense mismatch.

[0036] In a preferred embodiment, an array comprising probes corresponding to SEQ ID NOS: 1-14396 or the perfect match, perfect mismatch, antisense match, and antisense mismatch thereof may be used to monitor experimental parameters and/or sample preparation prior to engaging in experiments with larger, more expensive arrays. The sequences in SEQ ID NOS: 1-14396 correspond to a wide variety of organisms and thus can be used to aid in optimization and monitoring of experimental parameters and the sample preparation process.

[0037] In another embodiment, the current inventions provide a pool of sequences that may be used as probes for their complementary genes listed in the Genbank database. Methods for making probes are well known. See for example Sambrook, Fritsche and Maniatis. “Molecular Cloning A laboratory Manual” 2^{nd} Ed. Cold Spring Harbor Press (1989) (“Maniatis et al.”) which is hereby incorporated in its entirety by reference for all purposes. Maniatis et al. describes a number of uses for nucleic acid probes of defined sequence. Some of the uses described by Maniatis et al. include: to screen cDNA or genomic DNA libraries, or subclones derived from them, for additional clones containing segments of DNA that have been isolated and previously sequenced; in Southern, northern, or dot-blot hybridization to identify or detect the sequences of specific genes; in Southern, or dot-blot hybridization of genomic DNA to detect specific mutations in genes of known sequence; to detect specific mutations generated by site-directed mutagenesis of cloned genes; and to map the 5′ termini of mRNA molecules by primer extensions. Maniatis et al. describes other uses for probes throughout. See also Alberts et al. Molecular Biology of the Cell 3^{rd} edition, Garland Publishing Inc. (1994) p. 307 and Lodish et al. Molecular Cell Biology, 3^{rd} edition, Scientific American Books (1995) p. 285-286, each of which is hereby incorporated by reference in its entirety for all purposes, for a brief discussion of the use of nucleic acid probes in in situ hybridization. Other uses for probes derived from the sequences disclosed in the present inventions will be readily apparent to those of skill in the art. See, for example, Lodish et al. Molecular Cell Biology, 3^{rd} edition, Scientific American Books (1995) p.229-233, incorporated above, for a description of the construction of genomic libraries.

[0038] In another embodiment, the current inventions may be combined with known methods to monitor expression levels of genes in a wide variety of contexts. For example, where the effects of a drug on gene expression are to be determined, the drug will be administered to an organism, a tissue sample, or a cell and the gene expression levels will be analyzed. For example, nucleic acids are isolated from the treated tissue sample, cell, or a biological sample from the organism and from an untreated organism tissue sample or cell, hybridized to a high density probe array containing probes directed to the gene of interest and the expression levels of that gene are determined. The types of drugs that may be used in these types of experiments include, but are not limited to, antibiotics, antivirals, narcotics, anti-cancer drugs, tumor suppressing drugs, and any chemical composition that may affect the expression of genes in vivo or in vitro. The current inventions are particularly suited to be used in the types of analyses described by, for example, pending U.S. Pat. No. 6,309,822 and PCT Application No. 98/11223, each of which is incorporated by reference in its entirety for all purposes. As described in Wodicka et al., Nature Biotechnology 15 (1997), hereby incorporated by reference in its entirety for all purposes, because mRNA hybridization correlates to gene expression level, hybridization patterns can be compared to determine differential gene expression. As non-limiting examples: hybridization patterns from samples treated with certain types of drugs may be compared to hybridization patterns from samples that have not been treated or that have been treated with a different drug; hybridization patterns for samples infected with a specific virus may be compared against hybridization patterns from non-infected samples; hybridization patterns for samples with cancer may be compared against hybridization patterns for samples without cancer; hybridization patterns of samples from cancerous cells which have been treated with a tumor suppressing drug may be compared against untreated cancerous cells, etc. Zhang et al., Science 276 1268-1272, hereby incorporated by reference in its entirety for all purposes, provides an example of how gene expression data can provide a great deal of insight into cancer research. One skilled in the art will appreciate that a wide range of applications will be available using two or more, 10 or more, 100 or more, 1000 or more, 10,000 or more or 100,000 or more of the SEQ ID NOS: 1-14396 sequences as probes for gene expression analysis. The combination of the DNA array technology and sequences such as the bioB, bioC, bioD, cre, dap, lys, phe, thr, trp, human actin, human GAPDH, human transferrin receptor, human transcription factor ISGF-3, human 18S rRNA, human 28S rRNA, human alu, murine actin, murine GAPDH, murine tranferrin receptor, murine pyruvate carboxylase, murine B1/B2 repetitive elements, murine 18S rRNA, rat actin, rat GAPDH, rat hexokinase, rat 5S rRNA, rat B1/B2 repetitive elements, yeast actin, yeast TATA binding factor, yeast RNA polymerase II, yeast 18S rRNA and yeast 25S RNA sequence specific probes in this disclosure is a powerful tool for studying gene expression.

[0039] In another embodiment, the inventions may be used in conjunction with the techniques which link specific proteins to the mRNA which encodes the protein. See for example, Roberts and Szostak Proc. Natl. Acad. Sci. 94 12297-12302 (1997), which is incorporated herein in its entirety for all purposes. Hybridization of these mRNA protein fusion compounds to arrays comprised of two or more, 10 or more, 100 or more, 1000 or more, 10,000 or more, or 100,000 or more the sequences disclosed in the present inventions provides a powerful tool for monitoring expression levels.

[0040] In one embodiment, the current inventions provide a pool of unique nucleic acid sequences that can be used for parallel analysis of gene expression under selective conditions. Without wishing to be limited, genetic selection under selective conditions could include: variation in the temperature of the organism's environment; variation in pH levels in the organism's environment; variation in an organism's food (type, texture, amount etc.); variation in an organism's surroundings; etc. Arrays, such as those in the present inventions, can be used to determine whether gene expression is altered when an organism is exposed to selective conditions.

[0041] Methods for using nucleic acid arrays to analyze genetic selections under selective conditions are known. See for example, R. Cho et al., Proc. Natl. Acad. Sci. 95 3752-3757 (1998), incorporated herein in its entirety for all purposes. Cho et al. describes the use of a high-density array containing oligonucleotides complementary to every gene in the yeast Saccharomyces cerevisiae to perform two-hybrid protein-protein interaction screens for S. cerevisiae genes implicated in mRNA splicing and microtubule assembly. Cho et al. was able to characterize the results of a screen in a single experiment by hybridization of labeled DNA derived from positive clones. Briefly, as described by Cho et al., two proteins are expressed in yeast as fusions to either the DNA-binding domain or the activation domain of a transcription factor. Physical interaction of the two proteins reconstitutes transcriptional activity, turning on a gene essential for survival under selective conditions. In screening for novel protein-protein interactions, yeast cells are first transformed with a plasmid encoding a specific DNA-binding fusion protein. A plasmid library of activation domain fusions derived from genomic DNA is then introduced into these cells. Transcriptional activation fusions found in cells that survive selective conditions are considered to encode peptide domains that may interact with the DNA-binding domain fusion protein. Clones are then isolated from the two-hybrid screen and mixed into a single pool. Plasmid DNA is purified from the pooled clones and the gene inserts are amplified using PCR. The DNA products are then hybridized to yeast whole genome arrays for characterization. The methods employed by Cho et al. are applicable to the analysis of a range of genetic selections. High density arrays created using two or more, 10 or more, 100 or more, 1000 or more, 10,000 or more, or 100,000 or more of the sequences disclosed in the current inventions can be used to analyze genetic selections in the human, rat, murine or yeast system using the methods described in Cho et al.

[0042] In another embodiment, the current inventions provide a pool of unique nucleic acid sequences that can be used to identify biallelic markers, providing a novel and efficient approach to the study of genetic variation. For example, methods for using high density arrays comprised of probes that are complementary to the genomic DNA of a particular species to interrogate polymorphisms are well known. See for example, U.S. patent application Ser. No. 08/965,620 and U.S. Pat. No. 6,300,063, which are hereby incorporated herein for all purposes. Pools of two or more, 10 or more, 100 or more, 1000 or more, 10,000 or more, or 100,000 or more of the sequences disclosed in this invention combined with the methods described in the above patent applications provides a tool for studying genetic variation in the human, rat, murine, or yeast system.

[0043] In another embodiment of the inventions, genetic variation can be used to produce genetic maps of various strains of different species. Winzeler et al., “Direct Allelic Variation Scanning of the Yeast Genome” Science. 281(5380):1194-7. (1998), which is hereby incorporated for all purposes describe methods for conducting this type of screening with arrays containing probes complementary to the yeast genome. Briefly, genomic DNA from strains that are phenotypically different are isolated, fragmented, and labelled. Each strain is then hybridized to identical arrays comprised of the nucleic acid sequences complementary to the system being studied. Comparison of hybridization patterns between the various strains then serve as genetic markers. As described by Winzler et al, these markers can then be used for linkage analysis. High density arrays created from two or more, 10 or more, 100 or more, 1000 or more, 10,000 or more, or 100,000 or more of the sequences disclosed in the inventions can be used to study genetic variation using the methods described by Winzler et al.

[0044] In another embodiment, the present inventions may be used for cross-species comparisons. One skilled in the art will appreciate that it is often useful to determine whether a gene present in one species, for example the rat, is present in a conserved format in another species, including, without limitation, mouse, human, chicken, zebrafish, drosophila, or yeast. See, for example, Andersson et al., Mamm Genome 7(10):717-734 (1996), which is hereby incorporated by reference for all purposes, which describes the utility of cross-species comparisons. The use of two or more, 10 or more, 100 or more, 1000 or more, 10,000 or more or 100,000 or more of the sequences disclosed in the inventions in an array can be used to determine whether any of the sequence from one or more of the human, rat, mouse or yeast genes represented by the sequences disclosed in the inventions are conserved in another species by, for example, hybridizing genomic nucleic acid samples from another species to an array comprised of the sequences disclosed in the inventions. Areas of hybridization will yield genomic regions where the nucleotide sequence is highly conserved between the interrogation species and sequences such as the bioB, bioC, bioD, cre, dap, lys, phe, thr, tip, human actin, human GAPDH, human transferrin receptor, human transcription factor ISGF-3, human 18S rRNA, human 28S rRNA, human alu, murine actin, murine GAPDH, murine tranferrin receptor, murine pyruvate carboxylase, murine B1/B2 repetitive elements, murine 18S rRNA, rat actin, rat GAPDH, rat hexokinase, rat 5S rRNA, rat B1/B2 repetitive elements, yeast actin, yeast TATA binding factor, yeast RNA polymerase II, yeast 18S rRNA and yeast 25S RNA sequences disclosed in the inventions.

[0045] In another embodiment, the present inventions may be used to characterize the genotype of knockouts. Methods for using gene knockouts to identify a gene are well known. See for example, Lodish et al. Molecular Cell Biology, 3^{rd} Edition, Scientific American Books pub pp. 292-296 and U.S. Pat. No. 5,679,523, which are hereby incorporated by reference for all purposes. By isolating genomic nucleic acid samples from knockout species with a known phenotype and hybridizing the samples to an array comprised of two or more, 10 or more, 100 or more, 1000 or more, 10,000 or more, or 100,000 or more of the sequences disclosed in the inventions, candidates genes which contribute to the phenotype will be identified and made accessible for further characterization.

[0046] In another embodiment, the present inventions may be used to identify new gene family members. Methods of screening libraries with probes are well known. (See, for example, Maniatis et al, incorporated by reference above.) Because the present inventions are comprised of nucleic acid sequences from specific known genes, two or more, 10 or more, 100 or more, 1000 or more, 10,000 or more, or 100,000 or more of sequences disclosed in the inventions may be used as probes to screen genomic libraries to look for additional family members of those genes from which the target sequences are derived. In another embodiment, the present inventions may be used to provide nucleic acid sequences to be used as tag sequences. Tag sequences are a type of genetic “bar code” that can be used to label compounds of interest. The analysis of deletion mutants using tag sequences is described in, for example, Shoemaker et al., Nature Genetics 14 450-456 (1996), which is hereby incorporated by reference in its entirety for all purposes. Shoemaker et al. describes the use of PCR to generate large numbers of deletion strains. Each deletion strain is labelled with a unique 20-base tag sequence that can be hybridized to a high-density oligonucleotide array. The tags serve as unique identifiers (molecular bar codes) that allow analysis of large numbers of deletion strains simultanously through selective growth conditions. The use of tag sequences need not be limited to this example however. The utility of using unique known short oligonucleotide sequences capable of hybridizing to a nucleic acid array to label various compounds will be apparent to one skilled in the art. One or more, 10 or more, 100 or more, 1000 or more, 10,000 or more, or 100,000 or more of the SEQ ID NOS: 1-14396 sequences are excellent candidates to be used as tag sequences.

[0047] In another embodiment of the inventions, the sequences of the inventions may be used to generate primers directed to their corresponding genes as disclosed in the Genbank or any other public database. These primers may be used in such basic techniques as sequencing or PCR, see for example Maniatis et al., incorporated by reference above.

[0048] In another embodiment, the inventions provide a pool of nucleic acid sequences to be used as ligands for specific genes. The sequences disclosed in the inventions may be used as ligands to their corresponding genes as disclosed in the Genbank or any other public database. Compounds that specifically bind known genes are of interest for a variety of uses. One particular clinical use is to act as an antisense protein that specifically binds and disables a gene that has been, for example, linked to a disease. Methods and uses for ligands to specific genes are known. See for example, U.S. Pat. No. 5,723,594, which is hereby incorporated by reference in its entirety for all purposes. In a preferred embodiment, the hybridized nucleic acids are detected by detecting one or more labels attached to the sample nucleic acids. The labels may be incorporated by any of a number of means well known to those of skill in the art. In one embodiment, the label is simultaneously incorporated during the amplification step in the preparation of the sample nucleic acids. Thus, for example, polymerase chain reaction with labeled primers or labeled nucleotides will provide a labeled amplification product. In a another embodiment, transcription amplification, as described above, using a labeled nucleotide (e.g. fluorescein-labeled UTP and/or CTP) incorporates a label into the transcribed nucleic acids.

[0049] Alternatively, a label may be added directly to the original nucleic acid sample (e.g., mRNA, polyA mRNA, cDNA, etc.) or to the amplification product after the amplification is completed. Means of attaching labels to nucleic acids are well known to those of skill in the art and include, for example nick translation or end-labeling (e.g. with a labeled RNA) by kinasing of the nucleic acid and subsequent attachment (ligation) of a nucleic acid linker joining the sample nucleic acid to a label (e.g., a fluorophore). Detectable labels suitable for use in the present inventions include any composition detectable by spectroscopic, photochemical, biochemical, immunochemical, electrical, optical or chemical means. Useful labels in the present inventions include biotin for staining with labeled streptavidin conjugate, magnetic beads (e.g., Dynabead S), fluorescent dyes (e.g., fluorescein, texas red, rhodamine, green fluorescent protein, and the like), radiolabels (e.g., 3H, 125₁, 35_{S,} 14C, or ³²p), phosphorescent labels, enzymes (e.g., horse radish peroxidase, alkaline phosphatase and others commonly used in an ELISA), and calorimetric labels such as colloidal gold or colored glass or plastic (e.g., polystyrene, polypropylene, latex, etc.) beads. Patents teaching the use of such labels include U.S. Pat. Nos. 3,817,837; 3,850,752; 3,939,350; 3,996,345; 4,277,437; 4,275,149; and 4,366,241, each of which is hereby incorporated by reference in its entirety for all purposes.

[0050] Means of detecting such labels are well known to those of skill in the art. Thus, for example, radiolabels may be detected using photographic film or scintillation counters, fluorescent markers may be detected using a photodetector to detect emitted light. Enzymatic labels are typically detected by providing the enzyme with a substrate and detecting the reaction product produced by the action of the enzyme on the substrate, and colorimetric labels are detected by simply visualizing the colored label.

[0051] The label may be added to the target nucleic acid(s) prior to, or after the hybridization. So called “direct labels” are detectable labels that are directly attached to or incorporated into the target nucleic acid prior to hybridization. In contrast, so called “indirect labels” are joined to the hybrid duplex after hybridization. Often, the indirect label is attached to a binding moiety that has been attached to the target nucleic acid prior to the hybridization. Thus, for example, the target nucleic acid may be biotinylated before the hybridization. After hybridization, an aviden-conjugated fluorophore will bind the biotin bearing hybrid duplexes providing a label that is easily detected. For a detailed review of methods of labeling nucleic acids and detecting labeled hybridized nucleic acids see Laboratory Techniques in Biochemistry and Molecular Biology, Vol. 24: Hybridization With Nucleic Acid Probes, P. Tijssen, ed. Elsevier, N.Y., (1993), which is hereby incorporated by reference in its entirety for all purposes.

[0052] Fluorescent labels are preferred and easily added during an in vitro transcription reaction. In a preferred embodiment, fluorescein labeled UTP and CTP are incorporated into the RNA produced in an in vitro transcription reaction as described above.

### EXAMPLE

[0053] The following example serves to illustrate the type of experiment that could be conducted using the inventions.

[0054] Expression Monitoring by Hybridization to High Density Oligonucleotide Arrays

[0055] Arrays containing the desired number of probes can be synthesized using the method described in U.S. Pat. No. 5,143,854, incorporated by reference above. Extracted poly (A)⁺RNA can then be coverted to cDNA using the methods described below. The cDNA is then transcribed in the presence of labeled ribonucleotide triphosphates. The label may be biotin or a dye such as fluorescein. RNA is then fragmented with heat in the presence of magnesium ions. Hybridizations are carried out in a flow cell that contains the two-dimensional DNA probe arrays. Following a brief washing step to remove unhybridized RNA, the arrays are scanned using a scanning confocal microscope.

[0056] 1. A Method of RNA Preparation

[0057] Labeled RNA is prepared from clones containing a T7 RNA polymerase promoter site by incorporating labeled ribonucleotides in an IVT reaction. Either biotin-labeled or fluorescein-labeled UTP and CTP (1:3 labeled to unlabeled) plus unlabeled ATP and GTP is used for the reaction with 2500 U of T7 RNA polymerase. Following the reaction unincorporated nucleotide triphosphates are removed using size-selective membrane such as Microcon-100, (Amicon, Beverly, Mass.). The total molar concentration of RNA is based on a measurement of the absorbance at 260 rim. Following quantitation of RNA amounts, RNA is fragmented randomly to an average length of approximately 50 bases by heating at 940 in 40 mM Tris-acetate pH 8.1, 100 mM potassium acetate, 30 MM magnesium acetate, for 30 to 40 minutes. Fragmentation reduces possible interference from RNA secondary structure, and minimizes the effects of multiple interactions with closely spaced probe molecules. For material made directly from cellular RNA, cytoplasmic RNA is extracted from cells by the method of Favaloro et al. Methods Enzymol. 65:718-749 (1980) hereby incorporated by reference for all purposes, and poly (A)⁺RNA is isolated with an oligo dT selection step using, for example, Poly Atract, (Promega, Madison, Wis.). RNA can be amplified using a modification of the procedure described by Eberwine et al. Proc. Natl. Acad. Sci. USA 89:3010-3014 (1992), hereby incorporated by reference for all purposes. Microgram amounts of poly (A)⁺RNA are converted into double stranded cDNA using a cDNA synthesis kit (kits may be obtained from Life Technologies, Gaithersburg, Md.) with an oligo dT primer incorporating a T7 RNA polymerase promoter site. After second-strand synthesis, the reaction mixture is extracted with phenol/chloroform, and the double-stranded DNA isolated using a membrane filtration step using, for example, Microcon-100, (Amicon). Labeled cRNA can be made directly from the cDNA pool with an IVT step as described above. The total molar concentration of labeled cRNA is determined from the absorbance at 260 nm and assuming an average RNA size of 1000 ribonucleotides. The commonly used convention is that 1 OD is equivalent to 40 ug of RNA, and that 1 ug of cellular mRNA consists of 3 pmol of RNA molecules. Cellular mRNA may also be labeled directly without any intermediate cDNA synthesis steps. In this case, Poly (A)⁺RNA is fragmented as described, and the 5′ ends of the fragments are kinased and then incubated overnight with a biotinylated oligoribonucleotide (5′-biotin-AAAAAA-3′) in the presence of T4 RNA ligase (available from Epicentre Technologies, Madison, Wis.). Alternatively, mRNA has been labeled directly by UV-induced cross-linking to a psoralen derivative linked to biotin (available from Schleicher & Schuell, Keene, N.H.).

[0058] 2. Array Hybridization and Scanning:

[0059] Array hybridization solutions can be made containing 0.9 M NaCl, 60 mM EDTA, and 0.005% Triton X-100, adjusted to pH 7.6 (referred to as 6×SSPE-T). In addition, the solutions should contain 0.5 mg/ml unlabeled, degraded herring sperm DNA (available from Sigma, St. Louis, Mo.). Prior to hybridization, RNA samples are heated in the hybridization solution to 99° C. for 10 minutes, placed on ice for five minutes, and allowed to equilibrate at room temperature before being placed in the hybridization flow cell. Following hybridization, the solutions are removed, the arrays washed with 6×SSPE-T at 22 C. for seven minutes, and then washed with 0.5×SSPE-T at 40° C. for 15 minutes. When biotin labeled RNA is used the hybridized RNA should be stained with a streptavidinphycoerythrin in 6×SSPE-T at 40° C. for five minutes. The arrays are read using a scanning confocal microscope made by Molecular Dynamics (commercially available through Affymetrix, Santa Clara, Calif.). The scanner uses an argon ion laser as the excitation source, with the emission detected by a photomultiplier tube through either a 530 nm bandpass filter (flourescein) or a 560 nm longpass filter (phycoerythrin). Nucleic acids of either sense or antisense orientations may be used in hybridization experiments. Arrays for probes with either orientation (reverse complements of each other) are made using the same set of photolithgraphic masks by reversing the order of the photochemical steps and incorporating the complementary nucleotide.

[0060] 3. Quantitative Analysis of Hybridization Patterns and Intensities

[0061] Following a quantitative scan of an array, a grid is aligned to the image using the known dimensions of the array and the corner control regions as markers. The image is then reduced to a simple text file containing position and intensity information using software developed at Affymetrix (available with the confocal scanner). This information is merged with another text file that contains information relating physical position on the array to probe sequence and the identity of the RNA (and the specific part of the RNA) for which the oligonucleotide probe is designed. The quantitative analysis of the hybridization results involves a simple form of pattern recognition based on the assumption that, in the presence of a specific RNA, the perfect match (PM) probes will hybridize more strongly on average than their mismatch (MM) partners. The number of instances in which the PM hybridization is larger than the MM signal is computed along with the average of the logarithm of the PM/MM ratios for each probe set. These values are used to make a decision (using a predefined decision matrix) concerning the presence or absence of an RNA. To determine the quantitative RNA abundance, the average of the difference (PM-MM) for each probe family is calculated. The advantage of the difference method is that signals from random cross-hybridization contribute equally, on average, to the PM and MM probes, while specific hybridization contributes more to the PM probes. By averaging the pairwise differences, the real signals add constructively while the contributions from cross-hybridization tend to cancel. When assessing the differences between two different RNA samples, the hybridization signals from side-by-side experiments on identically synthesized arrays are compared directly. The magnitude of the changes in the average of the difference (PM-MM) values is interpreted by comparison with the results of spiking experiments as well as the signals observed for the internal standard bacterial and phase RNAs spiked into each sample at a known amount. Data analysis programs, such as those described in U.S. patent application Ser. No. 08/828,952 perform these operations automatically.

### CONCLUSION

[0062] The inventions herein provide a pool of unique nucleic acid sequences that are complementary to approximately 8124 specific known sequences, such as bioB, bioC, bioD, cre, dap, lys, phe, thr, trp, human actin, human GAPDH, human transferring receptor, human transcription factor ISGF-3, human 18S rRNA, human 28S rRNA, human alu, murine actin, murine GAPDH, murine tranferrin receptor, murine pyruvate carboxylase, murine B1/B2 repetitive elements, murine 18S rRNA, rat actin, rat GAPDH, rat hexokinase, rat 5S rRNA, rat, B1/B2 repetitive elements, yeast actin, yeast TATA binding factor, yeast RNA polymerase II, yeast 18S rRNA and yeast 25S RNA sequences. These sequences can be used for a variety of types of analyses.

[0063] The above description is illustrative and not restrictive. Many variations of the inventions will become apparent to those of skill in the art upon review of this disclosure. The scope of the inventions should, therefore, be determined not with reference to the above description, but instead be determined with reference to the appended claims along with their full scope of equivalents.

What is claimed is:

1. An array comprising at least 10 distinct nucleic acid probes, each probe being comprised of 9 or more consecutive nucleotides from at least one of the sequences listed in SEQ ID NOS: 1-14396, or the perfect sense match, sense mismatch, antisense match or antisense mismatch thereof.

2. The array of claim 1 comprising a plurality of nucleic acid probes, wherein each probe comprises one of the sequences listed in SEQ ID NOS: 1-14396 or the perfect sense match, sense mismatch, antisense match or antisense mismatch thereof.

3. The array of claim 1 wherein said array is used to monitor gene expression levels by hybridization to a DNA library.

4. The array of claim 1 wherein said array is used for analysis of genetic variation.

5. The array of claim 1 wherein said array is used for hybridization of tag-labeled compounds.

6. A method of analysis comprising:
a) hybridizing one or more nucleic acids to two or more nucleic acid probes, each probe comprising at least one of the sequences listed in SEQ ID NOS: 1-14396, or the perfect sense match, sense mismatch, antisense match or antisense mismatch thereof; and
b) detecting said hybridization.

7. The method of claim 6 wherein said nucleic acid probes are attached to a solid support.

8. The method of claim 6 wherein said analysis comprises monitoring gene expression levels.

9. The method of claim 8 wherein said monitoring gene expression levels comprises comparing gene expression levels of nucleic acids derived from two or more different samples and further comprises the step of: comparing said hybridization patterns between said nucleic acids derived from said two or more different samples.

10. The method of claim 6 wherein said method of analysis comprises identifying biallelic markers.

11. The method of claim 6 wherein said method of analysis comprises identifying polymorphisms.

12. The method of claim 6 wherein said method of analysis comprises a crossspecies comparison wherein the hybridization patterns of a pool of nucleic acids derived from one species are compared with the hybridization patterns of a pool of nucleic acids derived from another species.

13. The method of claim 6 wherein each of said nucleic acids further comprise a tag sequence.

14. The method of claim 6 wherein said method of analysis is a method of identifying family members of a gene.

15. A method comprising using any one or more nucleic acid sequences comprising at least one of the sequences listed in SEQ ID NOS: 1-14396, or the perfect sense match, sense mismatch, antisense match or antisense mismatch thereof as a probe.

16. The method of claim 15 wherein said probe is used in an in situ hybridization.

17. The method of claim 15 wherein said probe is used to screen cDNA or genomic libraries, or subclones derived from them, for additional clones containing segments of DNA that have been isolated and previously sequenced.

18. The method of claim 15 wherein said probe is used in Southern, northern, or dot-blot hybridization to identify or detect the sequence of any gene.

19. The method of claim 15 wherein said probe is used in Southern or dot-blot hybridization of genomic DNA to detect specific mutations in any gene.

20. The method of claim 15 wherein said probe is used to map the 5′ termini of mRNA molecules by primer extensions.

The application's sequence listing, which the Patent Office published only in electronic form, follows.

SEQUENCE LISTING (14936 sequences)

SEQ ID NO: 1 - DNA, 25 bp, Artificial Sequence
  Synthetic Oligonucleotide
aggacttgccatcgtagaactgctg

SEQ ID NO: 2 - DNA, 25 bp, Artificial Sequence
  Synthetic Oligonucleotide
cagcagttctacgatggcaagtcct

SEQ ID NO: 3 - DNA, 25 bp, Artificial Sequence
  Synthetic Oligonucleotide
aggacttgccatcgtagaactgctg

SEQ ID NO: 4 - DNA, 25 bp, Artificial Sequence
  Synthetic Oligonucleotide
cagcagttctacgatggcaagtcct

SEQ ID NO: 5 - DNA, 25 bp, Artificial Sequence
  Synthetic Oligonucleotide
aggacttgccatcgtagaactgctg

SEQ ID NO: 6 - DNA, 25 bp, Artificial Sequence
  Synthetic Oligonucleotide
cagcagttctacgatggcaagtcct

SEQ ID NO: 7 - DNA, 25 bp, Artificial Sequence
  Synthetic Oligonucleotide
aggacttgccatcgtagaactgctg

SEQ ID NO: 8 - DNA, 25 bp, Artificial Sequence
  Synthetic Oligonucleotide
cagcagttctacgatggcaagtcct

SEQ ID NO: 9 - DNA, 25 bp, Artificial Sequence
  Synthetic Oligonucleotide
aggacttgccatcgtagaactgctg

SEQ ID NO: 10 - DNA, 25 bp, Artificial Sequence
  Synthetic Oligonucleotide
cagcagttctacgatggcaagtcct

SEQ ID NO: 11 - DNA, 25 bp, Artificial Sequence
  Synthetic Oligonucleotide
aggacttgccatcgtagaactgctg

SEQ ID NO: 12 - DNA, 25 bp, Artificial Sequence
  Synthetic Oligonucleotide
cagcagttctacgatggcaagtcct

SEQ ID NO: 13 - DNA, 25 bp, Artificial Sequence
  Synthetic Oligonucleotide
aggacttgccatcgtagaactgctg

SEQ ID NO: 14 - DNA, 25 bp, Artificial Sequence
  Synthetic Oligonucleotide
cagcagttctacgatggcaagtcct

SEQ ID NO: 15 - DNA, 25 bp, Artificial Sequence
  Synthetic Oligonucleotide
aggacttgccatcgtagaactgctg

SEQ ID NO: 16 - DNA, 25 bp, Artificial Sequence
  Synthetic Oligonucleotide
cagcagttctacgatggcaagtcct

SEQ ID NO: 17 - DNA, 25 bp, Artificial Sequence
  Synthetic Oligonucleotide
aggacttgccatcgtagaactgctg

SEQ ID NO: 18 - DNA, 25 bp, Artificial Sequence
  Synthetic Oligonucleotide
cagcagttctacgatggcaagtcct

SEQ ID NO: 19 - DNA, 25 bp, Artificial Sequence
  Synthetic Oligonucleotide
aggacttgccatcgtagaactgctg

SEQ ID NO: 20 - DNA, 25 bp, Artificial Sequence
  Synthetic Oligonucleotide
cagcagttctacgatggcaagtcct

SEQ ID NO: 21 - DNA, 25 bp, Artificial Sequence
  Synthetic Oligonucleotide
aggacttgccatcgtagaactgctg

SEQ ID NO: 22 - DNA, 25 bp, Artificial Sequence
  Synthetic Oligonucleotide
cagcagttctacgatggcaagtcct

SEQ ID NO: 23 - DNA, 25 bp, Artificial Sequence
  Synthetic Oligonucleotide
aggacttgccatcgtagaactgctg

SEQ ID NO: 24 - DNA, 25 bp, Artificial Sequence
  Synthetic Oligonucleotide
cagcagttctacgatggcaagtcct

SEQ ID NO: 25 - DNA, 25 bp, Artificial Sequence
  Synthetic Oligonucleotide
aggacttgccatcgtagaactgctg

SEQ ID NO: 26 - DNA, 25 bp, Artificial Sequence
  Synthetic Oligonucleotide
cagcagttctacgatggcaagtcct

SEQ ID NO: 27 - DNA, 25 bp, Artificial Sequence
  Synthetic Oligonucleotide
aggacttgccatcgtagaactgctg

SEQ ID NO: 28 - DNA, 25 bp, Artificial Sequence
  Synthetic Oligonucleotide
cagcagttctacgatggcaagtcct

SEQ ID NO: 29 - DNA, 25 bp, Artificial Sequence
  Synthetic Oligonucleotide
aggacttgccatcgtagaactgctg

SEQ ID NO: 30 - DNA, 25 bp, Artificial Sequence
  Synthetic Oligonucleotide
cagcagttctacgatggcaagtcct

SEQ ID NO: 31 - DNA, 25 bp, Artificial Sequence
  Synthetic Oligonucleotide
aggacttgccatcgtagaactgctg

SEQ ID NO: 32 - DNA, 25 bp, Artificial Sequence
  Synthetic Oligonucleotide
cagcagttctacgatggcaagtcct

SEQ ID NO: 33 - DNA, 25 bp, Artificial Sequence
  Synthetic Oligonucleotide
aggacttgccatcgtagaactgctg

SEQ ID NO: 34 - DNA, 25 bp, Artificial Sequence
  Synthetic Oligonucleotide
cagcagttctacgatggcaagtcct

SEQ ID NO: 35 - DNA, 25 bp, Artificial Sequence
  Synthetic Oligonucleotide
aggacttgccatcgtagaactgctg

SEQ ID NO: 36 - DNA, 25 bp, Artificial Sequence
  Synthetic Oligonucleotide
cagcagttctacgatggcaagtcct

SEQ ID NO: 37 - DNA, 25 bp, Artificial Sequence
  Synthetic Oligonucleotide
aggacttgccatcgtagaactgctg

SEQ ID NO: 38 - DNA, 25 bp, Artificial Sequence
  Synthetic Oligonucleotide
cagcagttctacgatggcaagtcct

SEQ ID NO: 39 - DNA, 25 bp, Artificial Sequence
  Synthetic Oligonucleotide
aggacttgccatcgtagaactgctg

SEQ ID NO: 40 - DNA, 20 bp, Artificial Sequence
  Synthetic Oligonucleotide
cagttctacgatggcaagtc

SEQ ID NO: 41 - DNA, 20 bp, Artificial Sequence
  Synthetic Oligonucleotide
gacttgccatcgtagaactg

SEQ ID NO: 42 - DNA, 25 bp, Artificial Sequence
  Synthetic Oligonucleotide
aggacttgccatcgtagaactgctg

SEQ ID NO: 43 - DNA, 25 bp, Artificial Sequence
  Synthetic Oligonucleotide
cagcagttctacgatggcaagtcct

SEQ ID NO: 44 - DNA, 25 bp, Artificial Sequence
  Synthetic Oligonucleotide
aggacttgccatcgtagaactgctg

SEQ ID NO: 45 - DNA, 25 bp, Artificial Sequence
  Synthetic Oligonucleotide
cagcagttctacgatggcaagtcct

SEQ ID NO: 46 - DNA, 25 bp, Artificial Sequence
  Synthetic Oligonucleotide
aggacttgccatcgtagaactgctg

SEQ ID NO: 47 - DNA, 25 bp, Artificial Sequence
  Synthetic Oligonucleotide
cagcagttctacgatggcaagtcct

SEQ ID NO: 48 - DNA, 25 bp, Artificial Sequence
  Synthetic Oligonucleotide
aggacttgccatcgtagaactgctg

SEQ ID NO: 49 - DNA, 25 bp, Artificial Sequence
  Synthetic Oligonucleotide
cagcagttctacgatggcaagtcct

SEQ ID NO: 50 - DNA, 25 bp, Artificial Sequence
  Synthetic Oligonucleotide
aggacttgccatcgtagaactgctg

SEQ ID NO: 51 - DNA, 25 bp, Artificial Sequence
  Synthetic Oligonucleotide
cagcagttctacgatggcaagtcct

SEQ ID NO: 52 - DNA, 25 bp, Artificial Sequence
  Synthetic Oligonucleotide
aggacttgccatcgtagaactgctg

SEQ ID NO: 53 - DNA, 25 bp, Artificial Sequence
  Synthetic Oligonucleotide
cagcagttctacgatggcaagtcct

SEQ ID NO: 54 - DNA, 25 bp, Artificial Sequence
  Synthetic Oligonucleotide
aggacttgccatcgtagaactgctg

SEQ ID NO: 55 - DNA, 25 bp, Artificial Sequence
  Synthetic Oligonucleotide
cagcagttctacgatggcaagtcct

SEQ ID NO: 56 - DNA, 25 bp, Artificial Sequence
  Synthetic Oligonucleotide
aggacttgccatcgtagaactgctg

SEQ ID NO: 57 - DNA, 25 bp, Artificial Sequence
  Synthetic Oligonucleotide
cagcagttctacgatggcaagtcct

SEQ ID NO: 58 - DNA, 25 bp, Artificial Sequence
  Synthetic Oligonucleotide
aggacttgccatcgtagaactgctg

SEQ ID NO: 59 - DNA, 25 bp, Artificial Sequence
  Synthetic Oligonucleotide
cagcagttctacgatggcaagtcct

SEQ ID NO: 60 - DNA, 25 bp, Artificial Sequence
  Synthetic Oligonucleotide
aggacttgccatcgtagaactgctg

SEQ ID NO: 61 - DNA, 25 bp, Artificial Sequence
  Synthetic Oligonucleotide
cagcagttctacgatggcaagtcct

SEQ ID NO: 62 - DNA, 25 bp, Artificial Sequence
  Synthetic Oligonucleotide
aggacttgccatcgtagaactgctg

SEQ ID NO: 63 - DNA, 25 bp, Artificial Sequence
  Synthetic Oligonucleotide
cagcagttctacgatggcaagtcct

SEQ ID NO: 64 - DNA, 25 bp, Artificial Sequence
  Synthetic Oligonucleotide
aggacttgccatcgtagaactgctg

SEQ ID NO: 65 - DNA, 25 bp, Artificial Sequence
  Synthetic Oligonucleotide
cagcagttctacgatggcaagtcct

SEQ ID NO: 66 - DNA, 25 bp, Artificial Sequence
  Synthetic Oligonucleotide
aggacttgccatcgtagaactgctg

SEQ ID NO: 67 - DNA, 25 bp, Artificial Sequence
  Synthetic Oligonucleotide
cagcagttctacgatggcaagtcct

SEQ ID NO: 68 - DNA, 25 bp, Artificial Sequence
  Synthetic Oligonucleotide
aggacttgccatcgtagaactgctg

SEQ ID NO: 69 - DNA, 25 bp, Artificial Sequence
  Synthetic Oligonucleotide
cagcagttctacgatggcaagtcct

SEQ ID NO: 70 - DNA, 25 bp, Artificial Sequence
  Synthetic Oligonucleotide
aggacttgccatcgtagaactgctg

SEQ ID NO: 71 - DNA, 25 bp, Artificial Sequence
  Synthetic Oligonucleotide
cagcagttctacgatggcaagtcct

SEQ ID NO: 72 - DNA, 25 bp, Artificial Sequence
  Synthetic Oligonucleotide
aggacttgccatcgtagaactgctg

SEQ ID NO: 73 - DNA, 25 bp, Artificial Sequence
  Synthetic Oligonucleotide
cagcagttctacgatggcaagtcct

SEQ ID NO: 74 - DNA, 25 bp, Artificial Sequence
  Synthetic Oligonucleotide
aggacttgccatcgtagaactgctg

SEQ ID NO: 75 - DNA, 25 bp, Artificial Sequence
  Synthetic Oligonucleotide
cagcagttctacgatggcaagtcct

SEQ ID NO: 76 - DNA, 25 bp, Artificial Sequence
  Synthetic Oligonucleotide
aggacttgccatcgtagaactgctg

SEQ ID NO: 77 - DNA, 25 bp, Artificial Sequence
  Synthetic Oligonucleotide
cagcagttctacgatggcaagtcct

SEQ ID NO: 78 - DNA, 25 bp, Artificial Sequence
  Synthetic Oligonucleotide
aggacttgccatcgtagaactgctg

SEQ ID NO: 79 - DNA, 20 bp, Artificial Sequence
  Synthetic Oligonucleotide
cagttctacgatggcaagtc

SEQ ID NO: 80 - DNA, 20 bp, Artificial Sequence
  Synthetic Oligonucleotide
gacttgccatcgtagaactg

SEQ ID NO: 81 - DNA, 25 bp, Artificial Sequence
  Synthetic Oligonucleotide
aggacttgccatcgtagaactgctg

SEQ ID NO: 82 - DNA, 25 bp, Artificial Sequence
  Synthetic Oligonucleotide
cagcagttctacgatggcaagtcct

SEQ ID NO: 83 - DNA, 25 bp, Artificial Sequence
  Synthetic Oligonucleotide
aggacttgccatcgtagaactgctg

SEQ ID NO: 84 - DNA, 25 bp, Artificial Sequence
  Synthetic Oligonucleotide
cagcagttctacgatggcaagtcct

SEQ ID NO: 85 - DNA, 25 bp, Artificial Sequence
  Synthetic Oligonucleotide
aggacttgccatcgtagaactgctg

SEQ ID NO: 86 - DNA, 25 bp, Artificial Sequence
  Synthetic Oligonucleotide
cagcagttctacgatggcaagtcct

SEQ ID NO: 87 - DNA, 25 bp, Artificial Sequence
  Synthetic Oligonucleotide
aggacttgccatcgtagaactgctg

SEQ ID NO: 88 - DNA, 25 bp, Artificial Sequence
  Synthetic Oligonucleotide
cagcagttctacgatggcaagtcct

SEQ ID NO: 89 - DNA, 25 bp, Artificial Sequence
  Synthetic Oligonucleotide
aggacttgccatcgtagaactgctg

SEQ ID NO: 90 - DNA, 25 bp, Artificial Sequence
  Synthetic Oligonucleotide
cagcagttctacgatggcaagtcct

SEQ ID NO: 91 - DNA, 25 bp, Artificial Sequence
  Synthetic Oligonucleotide
aggacttgccatcgtagaactgctg

SEQ ID NO: 92 - DNA, 25 bp, Artificial Sequence
  Synthetic Oligonucleotide
cagcagttctacgatggcaagtcct

SEQ ID NO: 93 - DNA, 25 bp, Artificial Sequence
  Synthetic Oligonucleotide
aggacttgccatcgtagaactgctg

SEQ ID NO: 94 - DNA, 25 bp, Artificial Sequence
  Synthetic Oligonucleotide
cagcagttctacgatggcaagtcct

SEQ ID NO: 95 - DNA, 25 bp, Artificial Sequence
  Synthetic Oligonucleotide
aggacttgccatcgtagaactgctg

SEQ ID NO: 96 - DNA, 25 bp, Artificial Sequence
  Synthetic Oligonucleotide
cagcagttctacgatggcaagtcct

SEQ ID NO: 97 - DNA, 25 bp, Artificial Sequence
  Synthetic Oligonucleotide
aggacttgccatcgtagaactgctg

SEQ ID NO: 98 - DNA, 25 bp, Artificial Sequence
  Synthetic Oligonucleotide
cagcagttctacgatggcaagtcct

SEQ ID NO: 99 - DNA, 25 bp, Artificial Sequence
  Synthetic Oligonucleotide
aggacttgccatcgtagaactgctg

SEQ ID NO: 100 - DNA, 25 bp, Artificial Sequence
  Synthetic Oligonucleotide
cagcagttctacgatggcaagtcct

SEQ ID NO: 101 - DNA, 25 bp, Artificial Sequence
  Synthetic Oligonucleotide
aggacttgccatcgtagaactgctg

SEQ ID NO: 102 - DNA, 25 bp, Artificial Sequence
  Synthetic Oligonucleotide
cagcagttctacgatggcaagtcct

SEQ ID NO: 103 - DNA, 25 bp, Artificial Sequence
  Synthetic Oligonucleotide
aggacttgccatcgtagaactgctg

SEQ ID NO: 104 - DNA, 25 bp, Artificial Sequence
  Synthetic Oligonucleotide
cagcagttctacgatggcaagtcct

SEQ ID NO: 105 - DNA, 25 bp, Artificial Sequence
  Synthetic Oligonucleotide
aggacttgccatcgtagaactgctg

SEQ ID NO: 106 - DNA, 25 bp, Artificial Sequence
  Synthetic Oligonucleotide
cagcagttctacgatggcaagtcct

SEQ ID NO: 107 - DNA, 25 bp, Artificial Sequence
  Synthetic Oligonucleotide
aggacttgccatcgtagaactgctg

SEQ ID NO: 108 - DNA, 25 bp, Artificial Sequence
  Synthetic Oligonucleotide
cagcagttctacgatggcaagtcct

SEQ ID NO: 109 - DNA, 25 bp, Artificial Sequence
  Synthetic Oligonucleotide
aggacttgccatcgtagaactgctg

SEQ ID NO: 110 - DNA, 25 bp, Artificial Sequence
  Synthetic Oligonucleotide
cagcagttctacgatggcaagtcct

SEQ ID NO: 111 - DNA, 25 bp, Artificial Sequence
  Synthetic Oligonucleotide
aggacttgccatcgtagaactgctg

SEQ ID NO: 112 - DNA, 25 bp, Artificial Sequence
  Synthetic Oligonucleotide
cagcagttctacgatggcaagtcct

SEQ ID NO: 113 - DNA, 25 bp, Artificial Sequence
  Synthetic Oligonucleotide
aggacttgccatcgtagaactgctg

SEQ ID NO: 114 - DNA, 25 bp, Artificial Sequence
  Synthetic Oligonucleotide
cagcagttctacgatggcaagtcct

SEQ ID NO: 115 - DNA, 25 bp, Artificial Sequence
  Synthetic Oligonucleotide
aggacttgccatcgtagaactgctg

SEQ ID NO: 116 - DNA, 25 bp, Artificial Sequence
  Synthetic Oligonucleotide
cagcagttctacgatggcaagtcct

SEQ ID NO: 117 - DNA, 25 bp, Artificial Sequence
  Synthetic Oligonucleotide
aggacttgccatcgtagaactgctg

SEQ ID NO: 118 - DNA, 25 bp, Artificial Sequence
  Synthetic Oligonucleotide
cagcagttctacgatggcaagtcct

SEQ ID NO: 119 - DNA, 25 bp, Artificial Sequence
  Synthetic Oligonucleotide
cagcagttctacgatggcaagtcct

SEQ ID NO: 120 - DNA, 25 bp, Artificial Sequence
  Synthetic Oligonucleotide
aggacttgccatcgtagaactgctg

SEQ ID NO: 121 - DNA, 25 bp, Artificial Sequence
  Synthetic Oligonucleotide
cagcagttctacgatggcaagtcct

SEQ ID NO: 122 - DNA, 25 bp, Artificial Sequence
  Synthetic Oligonucleotide
aggacttgccatcgtagaactgctg

SEQ ID NO: 123 - DNA, 18 bp, Artificial Sequence
  Synthetic Oligonucleotide
agttctacgatggcaagt

SEQ ID NO: 124 - DNA, 18 bp, Artificial Sequence
  Synthetic Oligonucleotide
acttgccatcgtagaact

SEQ ID NO: 125 - DNA, 18 bp, Artificial Sequence
  Synthetic Oligonucleotide
agttctacgatggcaagt

SEQ ID NO: 126 - DNA, 18 bp, Artificial Sequence
  Synthetic Oligonucleotide
acttgccatcgtagaact

SEQ ID NO: 127 - DNA, 25 bp, Artificial Sequence
  Synthetic Oligonucleotide
cagcagttctacgatggcaagtcct

SEQ ID NO: 128 - DNA, 25 bp, Artificial Sequence
  Synthetic Oligonucleotide
aggacttgccatcgtagaactgctg

SEQ ID NO: 129 - DNA, 25 bp, Artificial Sequence
  Synthetic Oligonucleotide
cagcagttctacgatggcaagtcct

SEQ ID NO: 130 - DNA, 25 bp, Artificial Sequence
  Synthetic Oligonucleotide
aggacttgccatcgtagaactgctg

SEQ ID NO: 131 - DNA, 25 bp, Artificial Sequence
  Synthetic Oligonucleotide
aggacttgccatcgtagaactgctg

SEQ ID NO: 132 - DNA, 25 bp, Artificial Sequence
  Synthetic Oligonucleotide
cagcagttctacgatggcaagtcct

SEQ ID NO: 133 - DNA, 25 bp, Artificial Sequence
  Synthetic Oligonucleotide
aggacttgccatcgtagaactgctg

SEQ ID NO: 134 - DNA, 25 bp, Artificial Sequence
  Synthetic Oligonucleotide
cagcagttctacgatggcaagtcct

SEQ ID NO: 135 - DNA, 25 bp, Artificial Sequence
  Synthetic Oligonucleotide
attaagacactgaacgctgttacag

SEQ ID NO: 136 - DNA, 25 bp, Artificial Sequence
  Synthetic Oligonucleotide
tttattaagacactgaacgctgtta

SEQ ID NO: 137 - DNA, 25 bp, Artificial Sequence
  Synthetic Oligonucleotide
gcgaagtttgtcgtctaggtcgttg

SEQ ID NO: 138 - DNA, 25 bp, Artificial Sequence
  Synthetic Oligonucleotide
gacgacgcgaagtttgtcgtctagg

SEQ ID NO: 139 - DNA, 25 bp, Artificial Sequence
  Synthetic Oligonucleotide
ttacgaccgctacgtggacgacgcg

SEQ ID NO: 140 - DNA, 25 bp, Artificial Sequence
  Synthetic Oligonucleotide
tagctttacgaccgctacgtggacg

SEQ ID NO: 141 - DNA, 25 bp, Artificial Sequence
  Synthetic Oligonucleotide
tgctcctagctttacgaccgctacg

SEQ ID NO: 142 - DNA, 25 bp, Artificial Sequence
  Synthetic Oligonucleotide
gacgtggactgctcctagctttacg

SEQ ID NO: 143 - DNA, 25 bp, Artificial Sequence
  Synthetic Oligonucleotide
cgactggacgtggactgctcctagc

SEQ ID NO: 144 - DNA, 25 bp, Artificial Sequence
  Synthetic Oligonucleotide
gttgcacgactggacgtggactgct

SEQ ID NO: 145 - DNA, 25 bp, Artificial Sequence
  Synthetic Oligonucleotide
ttagctgtcgttgcacgactggacg

SEQ ID NO: 146 - DNA, 25 bp, Artificial Sequence
  Synthetic Oligonucleotide
ccagaattagctgtcgttgcacgac

SEQ ID NO: 147 - DNA, 25 bp, Artificial Sequence
  Synthetic Oligonucleotide
tgttcgaggccagaattagctgtcg

SEQ ID NO: 148 - DNA, 25 bp, Artificial Sequence
  Synthetic Oligonucleotide
cataaacgttagaaggcctgttcga

SEQ ID NO: 149 - DNA, 25 bp, Artificial Sequence
  Synthetic Oligonucleotide
gcaaacgcccgtcataaacgttaga

SEQ ID NO: 150 - DNA, 25 bp, Artificial Sequence
  Synthetic Oligonucleotide
cgcgctgcaaacgcccgtcataaac

SEQ ID NO: 151 - DNA, 25 bp, Artificial Sequence
  Synthetic Oligonucleotide
cgcgcggctgaggtcgtggacaagt

SEQ ID NO: 152 - DNA, 25 bp, Artificial Sequence
  Synthetic Oligonucleotide
gcgaaagcgaaacgcgcggctgagg

SEQ ID NO: 153 - DNA, 25 bp, Artificial Sequence
  Synthetic Oligonucleotide
gcagctaggacggcgaaagcgaaac

SEQ ID NO: 154 - DNA, 25 bp, Artificial Sequence
  Synthetic Oligonucleotide
gtatgtcttcgcgcagctaggacgg

SEQ ID NO: 155 - DNA, 25 bp, Artificial Sequence
  Synthetic Oligonucleotide
ctactataacggcattttgaggccg

SEQ ID NO: 156 - DNA, 25 bp, Artificial Sequence
  Synthetic Oligonucleotide
acaccactactataacggcattttg

SEQ ID NO: 157 - DNA, 25 bp, Artificial Sequence
  Synthetic Oligonucleotide
attcacgcacaccactactataacg

SEQ ID NO: 158 - DNA, 25 bp, Artificial Sequence
  Synthetic Oligonucleotide
caaggactattcacgcacaccacta

SEQ ID NO: 159 - DNA, 25 bp, Artificial Sequence
  Synthetic Oligonucleotide
tagctccgcaaggactattcacgca

SEQ ID NO: 160 - DNA, 25 bp, Artificial Sequence
  Synthetic Oligonucleotide
cgtagcgcgtgaaaaaggtcgcata

SEQ ID NO: 161 - DNA, 25 bp, Artificial Sequence
  Synthetic Oligonucleotide
ctagggccgtagcgcgtgaaaaagg

SEQ ID NO: 162 - DNA, 25 bp, Artificial Sequence
  Synthetic Oligonucleotide
ctgaaactagggccgtagcgcgtga

SEQ ID NO: 163 - DNA, 25 bp, Artificial Sequence
  Synthetic Oligonucleotide
gcggtcttgtctgaaactagggccg

SEQ ID NO: 164 - DNA, 25 bp, Artificial Sequence
  Synthetic Oligonucleotide
gggtgttacggcggtcttgtctgaa

SEQ ID NO: 165 - DNA, 25 bp, Artificial Sequence
  Synthetic Oligonucleotide
acgtcgttattaggccgcgctagaa

SEQ ID NO: 166 - DNA, 25 bp, Artificial Sequence
  Synthetic Oligonucleotide
aacggtcaacgtcgttattaggccg

SEQ ID NO: 167 - DNA, 25 bp, Artificial Sequence
  Synthetic Oligonucleotide
gccgtccaaacggtcaacgtcgtta

SEQ ID NO: 168 - DNA, 25 bp, Artificial Sequence
  Synthetic Oligonucleotide
tacaactaaccgtgcgaaaggccgc

SEQ ID NO: 169 - DNA, 25 bp, Artificial Sequence
  Synthetic Oligonucleotide
gtggtcgtacaactaaccgtgcgaa

SEQ ID NO: 170 - DNA, 16 bp, Artificial Sequence
  Synthetic Oligonucleotide
gttctacgatggcaag

SEQ ID NO: 171 - DNA, 16 bp, Artificial Sequence
  Synthetic Oligonucleotide
cttgccatcgtagaac

SEQ ID NO: 172 - DNA, 25 bp, Artificial Sequence
  Synthetic Oligonucleotide
aagtggaagtggtcgtacaactaac

SEQ ID NO: 173 - DNA, 25 bp, Artificial Sequence
  Synthetic Oligonucleotide
tcgccgcacggaaagtggaagtggt

SEQ ID NO: 174 - DNA, 25 bp, Artificial Sequence
  Synthetic Oligonucleotide
gtagtagcaatagccgttcgccgca

SEQ ID NO: 175 - DNA, 25 bp, Artificial Sequence
  Synthetic Oligonucleotide
cgtagctgtagtagcaatagccgtt

SEQ ID NO: 176 - DNA, 25 bp, Artificial Sequence
  Synthetic Oligonucleotide
tttagtttccgtagctgtagtagca

SEQ ID NO: 177 - DNA, 25 bp, Artificial Sequence
  Synthetic Oligonucleotide
ccaaccgtagtactaggcgcgctgg

SEQ ID NO: 178 - DNA, 25 bp, Artificial Sequence
  Synthetic Oligonucleotide
tgcattctccaaccgtagtactagg

SEQ ID NO: 179 - DNA, 25 bp, Artificial Sequence
  Synthetic Oligonucleotide
ctttccgcgtgcattctccaaccgt

SEQ ID NO: 180 - DNA, 25 bp, Artificial Sequence
  Synthetic Oligonucleotide
gacgagcgcaggccgtctttccgcg

SEQ ID NO: 181 - DNA, 25 bp, Artificial Sequence
  Synthetic Oligonucleotide
caagcaagtagacgagcgcaggccg

SEQ ID NO: 182 - DNA, 25 bp, Artificial Sequence
  Synthetic Oligonucleotide
gactcagacaagcaagtagacgagc

SEQ ID NO: 183 - DNA, 25 bp, Artificial Sequence
  Synthetic Oligonucleotide
gtagcggactcagacaagcaagtag

SEQ ID NO: 184 - DNA, 25 bp, Artificial Sequence
  Synthetic Oligonucleotide
tatttcgtgtagcggactcagacaa

SEQ ID NO: 185 - DNA, 25 bp, Artificial Sequence
  Synthetic Oligonucleotide
cggacggtatttcgtgtagcggact

SEQ ID NO: 186 - DNA, 25 bp, Artificial Sequence
  Synthetic Oligonucleotide
gctcaaacgcggacggtatttcgtg

SEQ ID NO: 187 - DNA, 25 bp, Artificial Sequence
  Synthetic Oligonucleotide
tcttttagctcaaacgcggacggta

SEQ ID NO: 188 - DNA, 25 bp, Artificial Sequence
  Synthetic Oligonucleotide
cgcaccagtcgtcaaacgttggcat

SEQ ID NO: 189 - DNA, 25 bp, Artificial Sequence
  Synthetic Oligonucleotide
gcctaagccgcaccagtcgtcaaac

SEQ ID NO: 190 - DNA, 25 bp, Artificial Sequence
  Synthetic Oligonucleotide
ggtcaaacgccttgtcaacgtccag

SEQ ID NO: 191 - DNA, 25 bp, Artificial Sequence
  Synthetic Oligonucleotide
gccgtcaaacgacgcctaaatcggg

SEQ ID NO: 192 - DNA, 25 bp, Artificial Sequence
  Synthetic Oligonucleotide
ggacggtcgtgccgtcaaacgacgc

SEQ ID NO: 193 - DNA, 25 bp, Artificial Sequence
  Synthetic Oligonucleotide
gtcgcggacaagttctgcaacgaca

SEQ ID NO: 194 - DNA, 25 bp, Artificial Sequence
  Synthetic Oligonucleotide
cccagtagtcgcggacaagttctgc

SEQ ID NO: 195 - DNA, 25 bp, Artificial Sequence
  Synthetic Oligonucleotide
ccacaggccccagtagtcgcggaca

SEQ ID NO: 196 - DNA, 25 bp, Artificial Sequence
  Synthetic Oligonucleotide
agtattacgacggcgcaacattata

SEQ ID NO: 197 - DNA, 25 bp, Artificial Sequence
  Synthetic Oligonucleotide
cgccgacgggctggtttacggcgac

SEQ ID NO: 198 - DNA, 25 bp, Artificial Sequence
  Synthetic Oligonucleotide
acgagtatcacacgccgacgggctg

SEQ ID NO: 199 - DNA, 25 bp, Artificial Sequence
  Synthetic Oligonucleotide
tagacgtacaacgagtatcacacgc

SEQ ID NO: 200 - DNA, 25 bp, Artificial Sequence
  Synthetic Oligonucleotide
gagaccgcgacatctagacgtacaa

SEQ ID NO: 201 - DNA, 25 bp, Artificial Sequence
  Synthetic Oligonucleotide
ttccgcagtcgtgagaccgcgacat

SEQ ID NO: 202 - DNA, 25 bp, Artificial Sequence
  Synthetic Oligonucleotide
gtaacggtcattccgcagtcgtgag

SEQ ID NO: 203 - DNA, 25 bp, Artificial Sequence
  Synthetic Oligonucleotide
aatgcgacaccttcgtaacggtcat

SEQ ID NO: 204 - DNA, 25 bp, Artificial Sequence
  Synthetic Oligonucleotide
cgagtaggtcggtccaggtgttggg

SEQ ID NO: 205 - DNA, 25 bp, Artificial Sequence
  Synthetic Oligonucleotide
actgcaagggcggtcaccgccgagt

SEQ ID NO: 206 - DNA, 25 bp, Artificial Sequence
  Synthetic Oligonucleotide
tctctagattccggcagtggacgcg

SEQ ID NO: 207 - DNA, 25 bp, Artificial Sequence
  Synthetic Oligonucleotide
cgtaaccgccgctctctagattccg

SEQ ID NO: 208 - DNA, 25 bp, Artificial Sequence
  Synthetic Oligonucleotide
cgcacggacttgttcgtaaccgccg

SEQ ID NO: 209 - DNA, 16 bp, Artificial Sequence
  Synthetic Oligonucleotide
gttctacgatggcaag

SEQ ID NO: 210 - DNA, 16 bp, Artificial Sequence
  Synthetic Oligonucleotide
cttgccatcgtagaac

SEQ ID NO: 211 - DNA, 25 bp, Artificial Sequence
  Synthetic Oligonucleotide
ccgtaggaagaccgcacggacttgt

SEQ ID NO: 212 - DNA, 25 bp, Artificial Sequence
  Synthetic Oligonucleotide
tctattaccagacgccgtaggaaga

SEQ ID NO: 213 - DNA, 25 bp, Artificial Sequence
  Synthetic Oligonucleotide
gagggcggtctattaccagacgccg

SEQ ID NO: 214 - DNA, 25 bp, Artificial Sequence
  Synthetic Oligonucleotide
tctagcttgcagcgtcagcgattgc

SEQ ID NO: 215 - DNA, 25 bp, Artificial Sequence
  Synthetic Oligonucleotide
aacgaggtacgttctagcttgcagc

SEQ ID NO: 216 - DNA, 25 bp, Artificial Sequence
  Synthetic Oligonucleotide
gacgctctaacgaggtacgttctag

SEQ ID NO: 217 - DNA, 25 bp, Artificial Sequence
  Synthetic Oligonucleotide
tggcgtggtgacgtgacgctctaac

SEQ ID NO: 218 - DNA, 25 bp, Artificial Sequence
  Synthetic Oligonucleotide
tcgagcgcctcacggcacctattta

SEQ ID NO: 219 - DNA, 25 bp, Artificial Sequence
  Synthetic Oligonucleotide
acggtgcggactactgcaagcccat

SEQ ID NO: 220 - DNA, 25 bp, Artificial Sequence
  Synthetic Oligonucleotide
taatcgtacgcctgcgagcaggtgg

SEQ ID NO: 221 - DNA, 25 bp, Artificial Sequence
  Synthetic Oligonucleotide
catttttcgctaatcgtacgcctgc

SEQ ID NO: 222 - DNA, 25 bp, Artificial Sequence
  Synthetic Oligonucleotide
gacaagctaaagtagaccgccattt

SEQ ID NO: 223 - DNA, 25 bp, Artificial Sequence
  Synthetic Oligonucleotide
gcaagtcgctgacaagctaaagtag

SEQ ID NO: 224 - DNA, 25 bp, Artificial Sequence
  Synthetic Oligonucleotide
attacgtgcggcaagtcgctgacaa

SEQ ID NO: 225 - DNA, 25 bp, Artificial Sequence
  Synthetic Oligonucleotide
gtcgcactacccgacttatactaca

SEQ ID NO: 226 - DNA, 25 bp, Artificial Sequence
  Synthetic Oligonucleotide
agtttggtgtcgcactacccgactt

SEQ ID NO: 227 - DNA, 25 bp, Artificial Sequence
  Synthetic Oligonucleotide
cgcgtagtagtttggtgtcgcacta

SEQ ID NO: 228 - DNA, 25 bp, Artificial Sequence
  Synthetic Oligonucleotide
taccgtgactcgcgtagtagtttgg

SEQ ID NO: 229 - DNA, 25 bp, Artificial Sequence
  Synthetic Oligonucleotide
cttgcgtaccgtgactcgcgtagta

SEQ ID NO: 230 - DNA, 25 bp, Artificial Sequence
  Synthetic Oligonucleotide
gaaagtcgcttgcgtaccgtgactc

SEQ ID NO: 231 - DNA, 25 bp, Artificial Sequence
  Synthetic Oligonucleotide
tggctacggaaagtcgcttgcgtac

SEQ ID NO: 232 - DNA, 25 bp, Artificial Sequence
  Synthetic Oligonucleotide
ctacgcaccgtggctacggaaagtc

SEQ ID NO: 233 - DNA, 25 bp, Artificial Sequence
  Synthetic Oligonucleotide
gtacttctacgcaccgtggctacgg

SEQ ID NO: 234 - DNA, 25 bp, Artificial Sequence
  Synthetic Oligonucleotide
cgcgggaagtacttctacgcaccgt

SEQ ID NO: 235 - DNA, 25 bp, Artificial Sequence
  Synthetic Oligonucleotide
gcgcccagcgcgggaagtacttcta

SEQ ID NO: 236 - DNA, 25 bp, Artificial Sequence
  Synthetic Oligonucleotide
agcgacgttgacgcttgcgcaatta

SEQ ID NO: 237 - DNA, 25 bp, Artificial Sequence
  Synthetic Oligonucleotide
aacgttagcgacgttgacgcttgcg

SEQ ID NO: 238 - DNA, 25 bp, Artificial Sequence
  Synthetic Oligonucleotide
gtccggtcaacgttagcgacgttga

SEQ ID NO: 239 - DNA, 25 bp, Artificial Sequence
  Synthetic Oligonucleotide
cacgtgttgaccgctgtcaaaaggg

SEQ ID NO: 240 - DNA, 25 bp, Artificial Sequence
  Synthetic Oligonucleotide
ccgaacattttcacgtgttgaccgc

SEQ ID NO: 241 - DNA, 25 bp, Artificial Sequence
  Synthetic Oligonucleotide
cgacggaaacgccgaacattttcac

SEQ ID NO: 242 - DNA, 25 bp, Artificial Sequence
  Synthetic Oligonucleotide
ccatcggacgacggaaacgccgaac

SEQ ID NO: 243 - DNA, 25 bp, Artificial Sequence
  Synthetic Oligonucleotide
ggcaggccatcggacgacggaaacg

SEQ ID NO: 244 - DNA, 25 bp, Artificial Sequence
  Synthetic Oligonucleotide
gtcgcgcagcgataacgcatttgga

SEQ ID NO: 245 - DNA, 25 bp, Artificial Sequence
  Synthetic Oligonucleotide
aggacttgccatcgtagaactgctg

SEQ ID NO: 246 - DNA, 25 bp, Artificial Sequence
  Synthetic Oligonucleotide
cagcagttctacgatggcaagtcct

SEQ ID NO: 247 - DNA, 25 bp, Artificial Sequence
  Synthetic Oligonucleotide
aggacttgccatcgtagaactgctg

SEQ ID NO: 248 - DNA, 25 bp, Artificial Sequence
  Synthetic Oligonucleotide
cagcagttctacgatggcaagtcct

SEQ ID NO: 249 - DNA, 25 bp, Artificial Sequence
  Synthetic Oligonucleotide
cagcagttctacgatggcaagtcct

SEQ ID NO: 250 - DNA, 25 bp, Artificial Sequence
  Synthetic Oligonucleotide
aggacttgccatcgtagaactgctg

SEQ ID NO: 251 - DNA, 25 bp, Artificial Sequence
  Synthetic Oligonucleotide
cagcagttctacgatggcaagtcct

SEQ ID NO: 252 - DNA, 25 bp, Artificial Sequence
  Synthetic Oligonucleotide
aggacttgccatcgtagaactgctg

SEQ ID NO: 253 - DNA, 25 bp, Artificial Sequence
  Synthetic Oligonucleotide
attaagacactgtacgctgttacag

SEQ ID NO: 254 - DNA, 25 bp, Artificial Sequence
  Synthetic Oligonucleotide
tttattaagacagtgaacgctgtta

SEQ ID NO: 255 - DNA, 25 bp, Artificial Sequence
  Synthetic Oligonucleotide
gcgaagtttgtcctctaggtcgttg

SEQ ID NO: 256 - DNA, 25 bp, Artificial Sequence
  Synthetic Oligonucleotide
gacgacgcgaagattgtcgtctagg

SEQ ID NO: 257 - DNA, 25 bp, Artificial Sequence
  Synthetic Oligonucleotide
ttacgaccgctaggtggacgacgcg

SEQ ID NO: 258 - DNA, 25 bp, Artificial Sequence
  Synthetic Oligonucleotide
tagctttacgacggctacgtggacg

SEQ ID NO: 259 - DNA, 25 bp, Artificial Sequence
  Synthetic Oligonucleotide
tgctcctagcttaacgaccgctacg

SEQ ID NO: 260 - DNA, 25 bp, Artificial Sequence
  Synthetic Oligonucleotide
gacgtggactgcacctagctttacg

SEQ ID NO: 261 - DNA, 25 bp, Artificial Sequence
  Synthetic Oligonucleotide
cgactggacgtgcactgctcctagc

SEQ ID NO: 262 - DNA, 25 bp, Artificial Sequence
  Synthetic Oligonucleotide
gttgcacgactgcacgtggactgct

SEQ ID NO: 263 - DNA, 25 bp, Artificial Sequence
  Synthetic Oligonucleotide
ttagctgtcgttccacgactggacg

SEQ ID NO: 264 - DNA, 25 bp, Artificial Sequence
  Synthetic Oligonucleotide
ccagaattagctctcgttgcacgac

SEQ ID NO: 265 - DNA, 25 bp, Artificial Sequence
  Synthetic Oligonucleotide
tgttcgaggccacaattagctgtcg

SEQ ID NO: 266 - DNA, 25 bp, Artificial Sequence
  Synthetic Oligonucleotide
cataaacgttagtaggcctgttcga

SEQ ID NO: 267 - DNA, 25 bp, Artificial Sequence
  Synthetic Oligonucleotide
gcaaacgcccgtgataaacgttaga

SEQ ID NO: 268 - DNA, 25 bp, Artificial Sequence
  Synthetic Oligonucleotide
cgcgctgcaaacccccgtcataaac

SEQ ID NO: 269 - DNA, 25 bp, Artificial Sequence
  Synthetic Oligonucleotide
cgcgcggctgagctcgtggacaagt

SEQ ID NO: 270 - DNA, 25 bp, Artificial Sequence
  Synthetic Oligonucleotide
gcgaaagcgaaaggcgcggctgagg

SEQ ID NO: 271 - DNA, 25 bp, Artificial Sequence
  Synthetic Oligonucleotide
gcagctaggacgccgaaagcgaaac

SEQ ID NO: 272 - DNA, 25 bp, Artificial Sequence
  Synthetic Oligonucleotide
gtatgtcttcgcccagctaggacgg

SEQ ID NO: 273 - DNA, 25 bp, Artificial Sequence
  Synthetic Oligonucleotide
ctactataacgggattttgaggccg

SEQ ID NO: 274 - DNA, 25 bp, Artificial Sequence
  Synthetic Oligonucleotide
acaccactactaaaacggcattttg

SEQ ID NO: 275 - DNA, 25 bp, Artificial Sequence
  Synthetic Oligonucleotide
attcacgcacacgactactataacg

SEQ ID NO: 276 - DNA, 25 bp, Artificial Sequence
  Synthetic Oligonucleotide
caaggactattctcgcacaccacta

SEQ ID NO: 277 - DNA, 25 bp, Artificial Sequence
  Synthetic Oligonucleotide
tagctccgcaagcactattcacgca

SEQ ID NO: 278 - DNA, 25 bp, Artificial Sequence
  Synthetic Oligonucleotide
cgtagcgcgtgataaaggtcgcata

SEQ ID NO: 279 - DNA, 25 bp, Artificial Sequence
  Synthetic Oligonucleotide
ctagggccgtagggcgtgaaaaagg

SEQ ID NO: 280 - DNA, 25 bp, Artificial Sequence
  Synthetic Oligonucleotide
ctgaaactaggggcgtagcgcgtga

SEQ ID NO: 281 - DNA, 25 bp, Artificial Sequence
  Synthetic Oligonucleotide
gcggtcttgtctcaaactagggccg

SEQ ID NO: 282 - DNA, 25 bp, Artificial Sequence
  Synthetic Oligonucleotide
gggtgttacggccgtcttgtctgaa

SEQ ID NO: 283 - DNA, 25 bp, Artificial Sequence
  Synthetic Oligonucleotide
acgtcgttattacgccgcgctagaa

SEQ ID NO: 284 - DNA, 25 bp, Artificial Sequence
  Synthetic Oligonucleotide
aacggtcaacgtggttattaggccg

SEQ ID NO: 285 - DNA, 25 bp, Artificial Sequence
  Synthetic Oligonucleotide
gccgtccaaacgctcaacgtcgtta

SEQ ID NO: 286 - DNA, 25 bp, Artificial Sequence
  Synthetic Oligonucleotide
tacaactaaccgagcgaaaggccgc

SEQ ID NO: 287 - DNA, 25 bp, Artificial Sequence
  Synthetic Oligonucleotide
gtggtcgtacaagtaaccgtgcgaa

SEQ ID NO: 288 - DNA, 25 bp, Artificial Sequence
  Synthetic Oligonucleotide
aagtggaagtggacgtacaactaac

SEQ ID NO: 289 - DNA, 25 bp, Artificial Sequence
  Synthetic Oligonucleotide
tcgccgcacggatagtggaagtggt

SEQ ID NO: 290 - DNA, 25 bp, Artificial Sequence
  Synthetic Oligonucleotide
gtagtagcaatacccgttcgccgca

SEQ ID NO: 291 - DNA, 25 bp, Artificial Sequence
  Synthetic Oligonucleotide
cgtagctgtagttgcaatagccgtt

SEQ ID NO: 292 - DNA, 25 bp, Artificial Sequence
  Synthetic Oligonucleotide
tttagtttccgttgctgtagtagca

SEQ ID NO: 293 - DNA, 25 bp, Artificial Sequence
  Synthetic Oligonucleotide
ccaaccgtagtagtaggcgcgctgg

SEQ ID NO: 294 - DNA, 25 bp, Artificial Sequence
  Synthetic Oligonucleotide
tgcattctccaagcgtagtactagg

SEQ ID NO: 295 - DNA, 25 bp, Artificial Sequence
  Synthetic Oligonucleotide
ctttccgcgtgctttctccaaccgt

SEQ ID NO: 296 - DNA, 25 bp, Artificial Sequence
  Synthetic Oligonucleotide
gacgagcgcagggcgtctttccgcg

SEQ ID NO: 297 - DNA, 25 bp, Artificial Sequence
  Synthetic Oligonucleotide
caagcaagtagaggagcgcaggccg

SEQ ID NO: 298 - DNA, 25 bp, Artificial Sequence
  Synthetic Oligonucleotide
gactcagacaaggaagtagacgagc

SEQ ID NO: 299 - DNA, 25 bp, Artificial Sequence
  Synthetic Oligonucleotide
gtagcggactcacacaagcaagtag

SEQ ID NO: 300 - DNA, 25 bp, Artificial Sequence
  Synthetic Oligonucleotide
tatttcgtgtaggggactcagacaa

SEQ ID NO: 301 - DNA, 25 bp, Artificial Sequence
  Synthetic Oligonucleotide
cggacggtatttggtgtagcggact

SEQ ID NO: 302 - DNA, 25 bp, Artificial Sequence
  Synthetic Oligonucleotide
gctcaaacgcggtcggtatttcgtg

SEQ ID NO: 303 - DNA, 25 bp, Artificial Sequence
  Synthetic Oligonucleotide
tcttttagctcatacgcggacggta

SEQ ID NO: 304 - DNA, 25 bp, Artificial Sequence
  Synthetic Oligonucleotide
cgcaccagtcgtgaaacgttggcat

SEQ ID NO: 305 - DNA, 25 bp, Artificial Sequence
  Synthetic Oligonucleotide
gcctaagccgcagcagtcgtcaaac

SEQ ID NO: 306 - DNA, 25 bp, Artificial Sequence
  Synthetic Oligonucleotide
ggtcaaacgcctagtcaacgtccag

SEQ ID NO: 307 - DNA, 25 bp, Artificial Sequence
  Synthetic Oligonucleotide
gccgtcaaacgaggcctaaatcggg

SEQ ID NO: 308 - DNA, 25 bp, Artificial Sequence
  Synthetic Oligonucleotide
ggacggtcgtgcggtcaaacgacgc

SEQ ID NO: 309 - DNA, 25 bp, Artificial Sequence
  Synthetic Oligonucleotide
gtcgcggacaagatctgcaacgaca

SEQ ID NO: 310 - DNA, 25 bp, Artificial Sequence
  Synthetic Oligonucleotide
cccagtagtcgccgacaagttctgc

SEQ ID NO: 311 - DNA, 25 bp, Artificial Sequence
  Synthetic Oligonucleotide
ccacaggccccactagtcgcggaca

SEQ ID NO: 312 - DNA, 25 bp, Artificial Sequence
  Synthetic Oligonucleotide
agtattacgacgccgcaacattata

SEQ ID NO: 313 - DNA, 25 bp, Artificial Sequence
  Synthetic Oligonucleotide
cgccgacgggctcgtttacggcgac

SEQ ID NO: 314 - DNA, 25 bp, Artificial Sequence
  Synthetic Oligonucleotide
acgagtatcacaggccgacgggctg

SEQ ID NO: 315 - DNA, 25 bp, Artificial Sequence
  Synthetic Oligonucleotide
tagacgtacaaccagtatcacacgc

SEQ ID NO: 316 - DNA, 25 bp, Artificial Sequence
  Synthetic Oligonucleotide
gagaccgcgacaactagacgtacaa

SEQ ID NO: 317 - DNA, 25 bp, Artificial Sequence
  Synthetic Oligonucleotide
ttccgcagtcgtcagaccgcgacat

SEQ ID NO: 318 - DNA, 25 bp, Artificial Sequence
  Synthetic Oligonucleotide
gtaacggtcattgcgcagtcgtgag

SEQ ID NO: 319 - DNA, 25 bp, Artificial Sequence
  Synthetic Oligonucleotide
aatgcgacacctacgtaacggtcat

SEQ ID NO: 320 - DNA, 25 bp, Artificial Sequence
  Synthetic Oligonucleotide
cgagtaggtcggaccaggtgttggg

SEQ ID NO: 321 - DNA, 25 bp, Artificial Sequence
  Synthetic Oligonucleotide
actgcaagggcgctcaccgccgagt

SEQ ID NO: 322 - DNA, 25 bp, Artificial Sequence
  Synthetic Oligonucleotide
tctctagattcccgcagtggacgcg

SEQ ID NO: 323 - DNA, 25 bp, Artificial Sequence
  Synthetic Oligonucleotide
cgtaaccgccgcactctagattccg

SEQ ID NO: 324 - DNA, 25 bp, Artificial Sequence
  Synthetic Oligonucleotide
cgcacggacttgatcgtaaccgccg

SEQ ID NO: 325 - DNA, 25 bp, Artificial Sequence
  Synthetic Oligonucleotide
ccgtaggaagacggcacggacttgt

SEQ ID NO: 326 - DNA, 25 bp, Artificial Sequence
  Synthetic Oligonucleotide
tctattaccagaggccgtaggaaga

SEQ ID NO: 327 - DNA, 25 bp, Artificial Sequence
  Synthetic Oligonucleotide
gagggcggtctaataccagacgccg

SEQ ID NO: 328 - DNA, 25 bp, Artificial Sequence
  Synthetic Oligonucleotide
tctagcttgcagggtcagcgattgc

SEQ ID NO: 329 - DNA, 25 bp, Artificial Sequence
  Synthetic Oligonucleotide
aacgaggtacgtactagcttgcagc

SEQ ID NO: 330 - DNA, 25 bp, Artificial Sequence
  Synthetic Oligonucleotide
gacgctctaacgtggtacgttctag

SEQ ID NO: 331 - DNA, 25 bp, Artificial Sequence
  Synthetic Oligonucleotide
tggcgtggtgacctgacgctctaac

SEQ ID NO: 332 - DNA, 25 bp, Artificial Sequence
  Synthetic Oligonucleotide
tcgagcgcctcagggcacctattta

SEQ ID NO: 333 - DNA, 25 bp, Artificial Sequence
  Synthetic Oligonucleotide
acggtgcggacttctgcaagcccat

SEQ ID NO: 334 - DNA, 25 bp, Artificial Sequence
  Synthetic Oligonucleotide
taatcgtacgccagcgagcaggtgg

SEQ ID NO: 335 - DNA, 25 bp, Artificial Sequence
  Synthetic Oligonucleotide
catttttcgctattcgtacgcctgc

SEQ ID NO: 336 - DNA, 25 bp, Artificial Sequence
  Synthetic Oligonucleotide
gacaagctaaagaagaccgccattt

SEQ ID NO: 337 - DNA, 25 bp, Artificial Sequence
  Synthetic Oligonucleotide
gcaagtcgctgagaagctaaagtag

SEQ ID NO: 338 - DNA, 25 bp, Artificial Sequence
  Synthetic Oligonucleotide
attacgtgcggctagtcgctgacaa

SEQ ID NO: 339 - DNA, 25 bp, Artificial Sequence
  Synthetic Oligonucleotide
gtcgcactaccccacttatactaca

SEQ ID NO: 340 - DNA, 25 bp, Artificial Sequence
  Synthetic Oligonucleotide
agtttggtgtcggactacccgactt

SEQ ID NO: 341 - DNA, 25 bp, Artificial Sequence
  Synthetic Oligonucleotide
cgcgtagtagttaggtgtcgcacta

SEQ ID NO: 342 - DNA, 25 bp, Artificial Sequence
  Synthetic Oligonucleotide
taccgtgactcgggtagtagtttgg

SEQ ID NO: 343 - DNA, 25 bp, Artificial Sequence
  Synthetic Oligonucleotide
cttgcgtaccgtcactcgcgtagta

SEQ ID NO: 344 - DNA, 25 bp, Artificial Sequence
  Synthetic Oligonucleotide
gaaagtcgcttgggtaccgtgactc

SEQ ID NO: 345 - DNA, 25 bp, Artificial Sequence
  Synthetic Oligonucleotide
tggctacggaaactcgcttgcgtac

SEQ ID NO: 346 - DNA, 25 bp, Artificial Sequence
  Synthetic Oligonucleotide
ctacgcaccgtgcctacggaaagtc

SEQ ID NO: 347 - DNA, 25 bp, Artificial Sequence
  Synthetic Oligonucleotide
gtacttctacgctccgtggctacgg

SEQ ID NO: 348 - DNA, 25 bp, Artificial Sequence
  Synthetic Oligonucleotide
cgcgggaagtacatctacgcaccgt

SEQ ID NO: 349 - DNA, 25 bp, Artificial Sequence
  Synthetic Oligonucleotide
gcgcccagcgcgcgaagtacttcta

SEQ ID NO: 350 - DNA, 25 bp, Artificial Sequence
  Synthetic Oligonucleotide
agcgacgttgacccttgcgcaatta

SEQ ID NO: 351 - DNA, 25 bp, Artificial Sequence
  Synthetic Oligonucleotide
aacgttagcgaccttgacgcttgcg

SEQ ID NO: 352 - DNA, 25 bp, Artificial Sequence
  Synthetic Oligonucleotide
gtccggtcaacgatagcgacgttga

SEQ ID NO: 353 - DNA, 25 bp, Artificial Sequence
  Synthetic Oligonucleotide
cacgtgttgacccctgtcaaaaggg

SEQ ID NO: 354 - DNA, 25 bp, Artificial Sequence
  Synthetic Oligonucleotide
ccgaacattttctcgtgttgaccgc

SEQ ID NO: 355 - DNA, 25 bp, Artificial Sequence
  Synthetic Oligonucleotide
cgacggaaacgcggaacattttcac

SEQ ID NO: 356 - DNA, 25 bp, Artificial Sequence
  Synthetic Oligonucleotide
ccatcggacgaccgaaacgccgaac

SEQ ID NO: 357 - DNA, 25 bp, Artificial Sequence
  Synthetic Oligonucleotide
ggcaggccatcgcacgacggaaacg

SEQ ID NO: 358 - DNA, 25 bp, Artificial Sequence
  Synthetic Oligonucleotide
gtcgcgcagcgaaaacgcatttgga

SEQ ID NO: 359 - DNA, 25 bp, Artificial Sequence
  Synthetic Oligonucleotide
cagcagttctacgatggcaagtcct

SEQ ID NO: 360 - DNA, 25 bp, Artificial Sequence
  Synthetic Oligonucleotide
aggacttgccatcgtagaactgctg

SEQ ID NO: 361 - DNA, 25 bp, Artificial Sequence
  Synthetic Oligonucleotide
cagcagttctacgatggcaagtcct

SEQ ID NO: 362 - DNA, 25 bp, Artificial Sequence
  Synthetic Oligonucleotide
aggacttgccatcgtagaactgctg

SEQ ID NO: 363 - DNA, 25 bp, Artificial Sequence
  Synthetic Oligonucleotide
cattgcggtcgcgcagcgataacgc

SEQ ID NO: 364 - DNA, 25 bp, Artificial Sequence
  Synthetic Oligonucleotide
aacgcgacattgcggtcgcgcagcg

SEQ ID NO: 365 - DNA, 25 bp, Artificial Sequence
  Synthetic Oligonucleotide
acgacaacgcgacattgcggtcgcg

SEQ ID NO: 366 - DNA, 25 bp, Artificial Sequence
  Synthetic Oligonucleotide
acgtccgacgacaacgcgacattgc

SEQ ID NO: 367 - DNA, 25 bp, Artificial Sequence
  Synthetic Oligonucleotide
aggtcgacgtccgacgacaacgcga

SEQ ID NO: 368 - DNA, 25 bp, Artificial Sequence
  Synthetic Oligonucleotide
acgcattaggtcgacgtccgacgac

SEQ ID NO: 369 - DNA, 25 bp, Artificial Sequence
  Synthetic Oligonucleotide
aatgacaacgcattaggtcgacgtc

SEQ ID NO: 370 - DNA, 25 bp, Artificial Sequence
  Synthetic Oligonucleotide
gccagacgggagaacgcgcgactac

SEQ ID NO: 371 - DNA, 25 bp, Artificial Sequence
  Synthetic Oligonucleotide
ctaagatagccagacgggagaacgc

SEQ ID NO: 372 - DNA, 25 bp, Artificial Sequence
  Synthetic Oligonucleotide
atggttactaagatagccagacggg

SEQ ID NO: 373 - DNA, 25 bp, Artificial Sequence
  Synthetic Oligonucleotide
gagtaatggttactaagatagccag

SEQ ID NO: 374 - DNA, 25 bp, Artificial Sequence
  Synthetic Oligonucleotide
aggccgcgagtaatggttactaaga

SEQ ID NO: 375 - DNA, 25 bp, Artificial Sequence
  Synthetic Oligonucleotide
gcgcattaggccgcgagtaatggtt

SEQ ID NO: 376 - DNA, 25 bp, Artificial Sequence
  Synthetic Oligonucleotide
gttcgcgcgcattaggccgcgagta

SEQ ID NO: 377 - DNA, 25 bp, Artificial Sequence
  Synthetic Oligonucleotide
cgccgcatttggtcggcggtcgtgg

SEQ ID NO: 378 - DNA, 25 bp, Artificial Sequence
  Synthetic Oligonucleotide
gacgttttcactttcacagtctttc

SEQ ID NO: 379 - DNA, 25 bp, Artificial Sequence
  Synthetic Oligonucleotide
ggttagacgttttcactttcacagt

SEQ ID NO: 380 - DNA, 25 bp, Artificial Sequence
  Synthetic Oligonucleotide
caaggacacaatgggttagacgttt

SEQ ID NO: 381 - DNA, 25 bp, Artificial Sequence
  Synthetic Oligonucleotide
cagtatataagtcgcactgcaaaag

SEQ ID NO: 382 - DNA, 25 bp, Artificial Sequence
  Synthetic Oligonucleotide
accagtatataagtcgcactgcaaa

SEQ ID NO: 383 - DNA, 25 bp, Artificial Sequence
  Synthetic Oligonucleotide
cgcaccagtatataagtcgcactgc

SEQ ID NO: 384 - DNA, 25 bp, Artificial Sequence
  Synthetic Oligonucleotide
cactcgcaccagtatataagtcgca

SEQ ID NO: 385 - DNA, 25 bp, Artificial Sequence
  Synthetic Oligonucleotide
gcccactcgcaccagtatataagtc

SEQ ID NO: 386 - DNA, 25 bp, Artificial Sequence
  Synthetic Oligonucleotide
acgcccactcgcaccagtatataag

SEQ ID NO: 387 - DNA, 25 bp, Artificial Sequence
  Synthetic Oligonucleotide
tcgtcgccgcgcccttagtacgccc

SEQ ID NO: 388 - DNA, 25 bp, Artificial Sequence
  Synthetic Oligonucleotide
agggtcgtcgccgcgcccttagtac

SEQ ID NO: 389 - DNA, 25 bp, Artificial Sequence
  Synthetic Oligonucleotide
gagagggtcgtcgccgcgcccttag

SEQ ID NO: 390 - DNA, 25 bp, Artificial Sequence
  Synthetic Oligonucleotide
cccctagagagggtcgtcgccgcgc

SEQ ID NO: 391 - DNA, 25 bp, Artificial Sequence
  Synthetic Oligonucleotide
cggtcccctagagagggtcgtcgcc

SEQ ID NO: 392 - DNA, 25 bp, Artificial Sequence
  Synthetic Oligonucleotide
gttcggtcccctagagagggtcgtc

SEQ ID NO: 393 - DNA, 25 bp, Artificial Sequence
  Synthetic Oligonucleotide
acgttcggtcccctagagagggtcg

SEQ ID NO: 394 - DNA, 25 bp, Artificial Sequence
  Synthetic Oligonucleotide
aaagacgttcggtcccctagagagg

SEQ ID NO: 395 - DNA, 25 bp, Artificial Sequence
  Synthetic Oligonucleotide
ctaaaagacgttcggtcccctagag

SEQ ID NO: 396 - DNA, 25 bp, Artificial Sequence
  Synthetic Oligonucleotide
gacctaaaagacgttcggtccccta

SEQ ID NO: 397 - DNA, 25 bp, Artificial Sequence
  Synthetic Oligonucleotide
cgtagctggccattacgtccgttta

SEQ ID NO: 398 - DNA, 25 bp, Artificial Sequence
  Synthetic Oligonucleotide
agtagtgagcaacgtagctggccat

SEQ ID NO: 399 - DNA, 25 bp, Artificial Sequence
  Synthetic Oligonucleotide
gtccaagaacgcttggagtagtgag

SEQ ID NO: 400 - DNA, 25 bp, Artificial Sequence
  Synthetic Oligonucleotide
gacttgtacaggtagtccaagaacg

SEQ ID NO: 401 - DNA, 25 bp, Artificial Sequence
  Synthetic Oligonucleotide
tgcggaccgctagggacttgtacag

SEQ ID NO: 402 - DNA, 25 bp, Artificial Sequence
  Synthetic Oligonucleotide
gtccatacgagtcttttgcggaccg

SEQ ID NO: 403 - DNA, 25 bp, Artificial Sequence
  Synthetic Oligonucleotide
ccaataagttgaacgtggtacggcg

SEQ ID NO: 404 - DNA, 25 bp, Artificial Sequence
  Synthetic Oligonucleotide
tatcttctattagcgcttgtagaag

SEQ ID NO: 405 - DNA, 25 bp, Artificial Sequence
  Synthetic Oligonucleotide
gtctggcgcgcggacttctatatct

SEQ ID NO: 406 - DNA, 25 bp, Artificial Sequence
  Synthetic Oligonucleotide
gtacaaatcgaccgggtttacaacg

SEQ ID NO: 407 - DNA, 25 bp, Artificial Sequence
  Synthetic Oligonucleotide
ggctgctacttcgtacaaatcgacc

SEQ ID NO: 408 - DNA, 25 bp, Artificial Sequence
  Synthetic Oligonucleotide
gacagtgaaccagcaccgtcgggcc

SEQ ID NO: 409 - DNA, 25 bp, Artificial Sequence
  Synthetic Oligonucleotide
ctttgtcgtaacgacagtgaaccag

SEQ ID NO: 410 - DNA, 25 bp, Artificial Sequence
  Synthetic Oligonucleotide
cggcgtattggtcactttgtcgtaa

SEQ ID NO: 411 - DNA, 25 bp, Artificial Sequence
  Synthetic Oligonucleotide
cggacaaaacgtgcaagtggccgta

SEQ ID NO: 412 - DNA, 25 bp, Artificial Sequence
  Synthetic Oligonucleotide
cttgcgatctcggacaaaacgtgca

SEQ ID NO: 413 - DNA, 25 bp, Artificial Sequence
  Synthetic Oligonucleotide
tttagtcacgcaagcttgcgatctc

SEQ ID NO: 414 - DNA, 25 bp, Artificial Sequence
  Synthetic Oligonucleotide
tagcgataaaaggtactcacttgct

SEQ ID NO: 415 - DNA, 25 bp, Artificial Sequence
  Synthetic Oligonucleotide
ggaccgtcgctagcgataaaaggta

SEQ ID NO: 416 - DNA, 25 bp, Artificial Sequence
  Synthetic Oligonucleotide
catgcactctatagaaattgggact

SEQ ID NO: 417 - DNA, 25 bp, Artificial Sequence
  Synthetic Oligonucleotide
agatgtggacgccacgattggtcgc

SEQ ID NO: 418 - DNA, 25 bp, Artificial Sequence
  Synthetic Oligonucleotide
ttcacggaagagatgtggacgccac

SEQ ID NO: 419 - DNA, 25 bp, Artificial Sequence
  Synthetic Oligonucleotide
ctctgcctttaggtagcgagctggt

SEQ ID NO: 420 - DNA, 25 bp, Artificial Sequence
  Synthetic Oligonucleotide
tcgatgtggtctctgcctttaggta

SEQ ID NO: 421 - DNA, 25 bp, Artificial Sequence
  Synthetic Oligonucleotide
agcctagtagtcgatgtggtctctg

SEQ ID NO: 422 - DNA, 25 bp, Artificial Sequence
  Synthetic Oligonucleotide
catcaataagcctagtagtcgatgt

SEQ ID NO: 423 - DNA, 25 bp, Artificial Sequence
  Synthetic Oligonucleotide
cccgcgctcaactatcgaccgacca

SEQ ID NO: 424 - DNA, 25 bp, Artificial Sequence
  Synthetic Oligonucleotide
gcggcatttagttagctactcaacg

SEQ ID NO: 425 - DNA, 25 bp, Artificial Sequence
  Synthetic Oligonucleotide
agtaggaatcgcggcatttagttag

SEQ ID NO: 426 - DNA, 25 bp, Artificial Sequence
  Synthetic Oligonucleotide
catagagactggtctcagtaggaat

SEQ ID NO: 427 - DNA, 25 bp, Artificial Sequence
  Synthetic Oligonucleotide
tctggtccggtccatagagactggt

SEQ ID NO: 428 - DNA, 25 bp, Artificial Sequence
  Synthetic Oligonucleotide
ctgtgcccgtgacacaggtctggtc

SEQ ID NO: 429 - DNA, 25 bp, Artificial Sequence
  Synthetic Oligonucleotide
agagcgcgccgaggctgtgcccgtg

SEQ ID NO: 430 - DNA, 25 bp, Artificial Sequence
  Synthetic Oligonucleotide
tttgaggtcgcgcccggtatagagc

SEQ ID NO: 431 - DNA, 25 bp, Artificial Sequence
  Synthetic Oligonucleotide
cgtactagaggccataactttgagg

SEQ ID NO: 432 - DNA, 25 bp, Artificial Sequence
  Synthetic Oligonucleotide
ggtcggtggtcgaacgtactagagg

SEQ ID NO: 433 - DNA, 25 bp, Artificial Sequence
  Synthetic Oligonucleotide
tataaatgtaaccaggtcggtggtc

SEQ ID NO: 434 - DNA, 25 bp, Artificial Sequence
  Synthetic Oligonucleotide
atcaagtactgttataaatgtaacc

SEQ ID NO: 435 - DNA, 25 bp, Artificial Sequence
  Synthetic Oligonucleotide
tccaatgcctatatcaagtactgtt

SEQ ID NO: 436 - DNA, 25 bp, Artificial Sequence
  Synthetic Oligonucleotide
cgcgtggtaacggggacaaagtgat

SEQ ID NO: 437 - DNA, 25 bp, Artificial Sequence
  Synthetic Oligonucleotide
aggacttgccatcgtagaactgctg

SEQ ID NO: 438 - DNA, 25 bp, Artificial Sequence
  Synthetic Oligonucleotide
ctctggtcctaagtgaattttctgg

SEQ ID NO: 439 - DNA, 25 bp, Artificial Sequence
  Synthetic Oligonucleotide
gcctgtgaacttgtttataccaaaa

SEQ ID NO: 440 - DNA, 25 bp, Artificial Sequence
  Synthetic Oligonucleotide
gtaaaggaaggtgtcccgaagcaaa

SEQ ID NO: 441 - DNA, 25 bp, Artificial Sequence
  Synthetic Oligonucleotide
gtaaaggaaggtgtcccgaagcaaa

SEQ ID NO: 442 - DNA, 25 bp, Artificial Sequence
  Synthetic Oligonucleotide
cattgcggtcgcccagcgataacgc

SEQ ID NO: 443 - DNA, 25 bp, Artificial Sequence
  Synthetic Oligonucleotide
aacgcgacattggggtcgcgcagcg

SEQ ID NO: 444 - DNA, 25 bp, Artificial Sequence
  Synthetic Oligonucleotide
acgacaacgcgagattgcggtcgcg

SEQ ID NO: 445 - DNA, 25 bp, Artificial Sequence
  Synthetic Oligonucleotide
acgtccgacgactacgcgacattgc

SEQ ID NO: 446 - DNA, 25 bp, Artificial Sequence
  Synthetic Oligonucleotide
aggtcgacgtcccacgacaacgcga

SEQ ID NO: 447 - DNA, 25 bp, Artificial Sequence
  Synthetic Oligonucleotide
acgcattaggtccacgtccgacgac

SEQ ID NO: 448 - DNA, 25 bp, Artificial Sequence
  Synthetic Oligonucleotide
aatgacaacgcaataggtcgacgtc

SEQ ID NO: 449 - DNA, 25 bp, Artificial Sequence
  Synthetic Oligonucleotide
gccagacgggagtacgcgcgactac

SEQ ID NO: 450 - DNA, 25 bp, Artificial Sequence
  Synthetic Oligonucleotide
ctaagatagccacacgggagaacgc

SEQ ID NO: 451 - DNA, 25 bp, Artificial Sequence
  Synthetic Oligonucleotide
atggttactaagttagccagacggg

SEQ ID NO: 452 - DNA, 25 bp, Artificial Sequence
  Synthetic Oligonucleotide
gagtaatggttagtaagatagccag

SEQ ID NO: 453 - DNA, 25 bp, Artificial Sequence
  Synthetic Oligonucleotide
aggccgcgagtattggttactaaga

SEQ ID NO: 454 - DNA, 25 bp, Artificial Sequence
  Synthetic Oligonucleotide
gcgcattaggccccgagtaatggtt

SEQ ID NO: 455 - DNA, 25 bp, Artificial Sequence
  Synthetic Oligonucleotide
gttcgcgcgcataaggccgcgagta

SEQ ID NO: 456 - DNA, 25 bp, Artificial Sequence
  Synthetic Oligonucleotide
cgccgcatttggacggcggtcgtgg

SEQ ID NO: 457 - DNA, 25 bp, Artificial Sequence
  Synthetic Oligonucleotide
gacgttttcactatcacagtctttc

SEQ ID NO: 458 - DNA, 25 bp, Artificial Sequence
  Synthetic Oligonucleotide
ggttagacgtttacactttcacagt

SEQ ID NO: 459 - DNA, 25 bp, Artificial Sequence
  Synthetic Oligonucleotide
caaggacacaatcggttagacgttt

SEQ ID NO: 460 - DNA, 25 bp, Artificial Sequence
  Synthetic Oligonucleotide
cagtatataagtggcactgcaaaag

SEQ ID NO: 461 - DNA, 25 bp, Artificial Sequence
  Synthetic Oligonucleotide
accagtatataactcgcactgcaaa

SEQ ID NO: 462 - DNA, 25 bp, Artificial Sequence
  Synthetic Oligonucleotide
cgcaccagtataaaagtcgcactgc

SEQ ID NO: 463 - DNA, 25 bp, Artificial Sequence
  Synthetic Oligonucleotide
cactcgcaccagaatataagtcgca

SEQ ID NO: 464 - DNA, 25 bp, Artificial Sequence
  Synthetic Oligonucleotide
gcccactcgcacgagtatataagtc

SEQ ID NO: 465 - DNA, 25 bp, Artificial Sequence
  Synthetic Oligonucleotide
acgcccactcgctccagtatataag

SEQ ID NO: 466 - DNA, 25 bp, Artificial Sequence
  Synthetic Oligonucleotide
tcgtcgccgcgcgcttagtacgccc

SEQ ID NO: 467 - DNA, 25 bp, Artificial Sequence
  Synthetic Oligonucleotide
agggtcgtcgccccgcccttagtac

SEQ ID NO: 468 - DNA, 25 bp, Artificial Sequence
  Synthetic Oligonucleotide
gagagggtcgtccccgcgcccttag

SEQ ID NO: 469 - DNA, 25 bp, Artificial Sequence
  Synthetic Oligonucleotide
cccctagagaggctcgtcgccgcgc

SEQ ID NO: 470 - DNA, 25 bp, Artificial Sequence
  Synthetic Oligonucleotide
cggtcccctagacagggtcgtcgcc

SEQ ID NO: 471 - DNA, 25 bp, Artificial Sequence
  Synthetic Oligonucleotide
gttcggtccccttgagagggtcgtc

SEQ ID NO: 472 - DNA, 25 bp, Artificial Sequence
  Synthetic Oligonucleotide
acgttcggtcccgtagagagggtcg

SEQ ID NO: 473 - DNA, 25 bp, Artificial Sequence
  Synthetic Oligonucleotide
aaagacgttcggacccctagagagg

SEQ ID NO: 474 - DNA, 25 bp, Artificial Sequence
  Synthetic Oligonucleotide
ctaaaagacgttgggtcccctagag

SEQ ID NO: 475 - DNA, 25 bp, Artificial Sequence
  Synthetic Oligonucleotide
gacctaaaagaccttcggtccccta

SEQ ID NO: 476 - DNA, 25 bp, Artificial Sequence
  Synthetic Oligonucleotide
cgtagctggccaatacgtccgttta

SEQ ID NO: 477 - DNA, 25 bp, Artificial Sequence
  Synthetic Oligonucleotide
agtagtgagcaaggtagctggccat

SEQ ID NO: 478 - DNA, 25 bp, Artificial Sequence
  Synthetic Oligonucleotide
gtccaagaacgcatggagtagtgag

SEQ ID NO: 479 - DNA, 25 bp, Artificial Sequence
  Synthetic Oligonucleotide
gacttgtacaggaagtccaagaacg

SEQ ID NO: 480 - DNA, 25 bp, Artificial Sequence
  Synthetic Oligonucleotide
tgcggaccgctacggacttgtacag

SEQ ID NO: 481 - DNA, 25 bp, Artificial Sequence
  Synthetic Oligonucleotide
gtccatacgagtgttttgcggaccg

SEQ ID NO: 482 - DNA, 25 bp, Artificial Sequence
  Synthetic Oligonucleotide
ccaataagttgatcgtggtacggcg

SEQ ID NO: 483 - DNA, 25 bp, Artificial Sequence
  Synthetic Oligonucleotide
tatcttctattaccgcttgtagaag

SEQ ID NO: 484 - DNA, 25 bp, Artificial Sequence
  Synthetic Oligonucleotide
gtctggcgcgcgcacttctatatct

SEQ ID NO: 485 - DNA, 25 bp, Artificial Sequence
  Synthetic Oligonucleotide
gtacaaatcgacggggtttacaacg

SEQ ID NO: 486 - DNA, 25 bp, Artificial Sequence
  Synthetic Oligonucleotide
ggctgctacttcctacaaatcgacc

SEQ ID NO: 487 - DNA, 25 bp, Artificial Sequence
  Synthetic Oligonucleotide
gacagtgaaccaccaccgtcgggcc

SEQ ID NO: 488 - DNA, 25 bp, Artificial Sequence
  Synthetic Oligonucleotide
ctttgtcgtaaccacagtgaaccag

SEQ ID NO: 489 - DNA, 25 bp, Artificial Sequence
  Synthetic Oligonucleotide
cggcgtattggtgactttgtcgtaa

SEQ ID NO: 490 - DNA, 25 bp, Artificial Sequence
  Synthetic Oligonucleotide
cggacaaaacgtccaagtggccgta

SEQ ID NO: 491 - DNA, 25 bp, Artificial Sequence
  Synthetic Oligonucleotide
cttgcgatctcgcacaaaacgtgca

SEQ ID NO: 492 - DNA, 25 bp, Artificial Sequence
  Synthetic Oligonucleotide
tttagtcacgcatgcttgcgatctc

SEQ ID NO: 493 - DNA, 25 bp, Artificial Sequence
  Synthetic Oligonucleotide
tagcgataaaagctactcacttgct

SEQ ID NO: 494 - DNA, 25 bp, Artificial Sequence
  Synthetic Oligonucleotide
ggaccgtcgctaccgataaaaggta

SEQ ID NO: 495 - DNA, 25 bp, Artificial Sequence
  Synthetic Oligonucleotide
catgcactctattgaaattgggact

SEQ ID NO: 496 - DNA, 25 bp, Artificial Sequence
  Synthetic Oligonucleotide
agatgtggacgcgacgattggtcgc

SEQ ID NO: 497 - DNA, 25 bp, Artificial Sequence
  Synthetic Oligonucleotide
ttcacggaagagttgtggacgccac

SEQ ID NO: 498 - DNA, 25 bp, Artificial Sequence
  Synthetic Oligonucleotide
ctctgcctttagctagcgagctggt

SEQ ID NO: 499 - DNA, 25 bp, Artificial Sequence
  Synthetic Oligonucleotide
tcgatgtggtctgtgcctttaggta

SEQ ID NO: 500 - DNA, 25 bp, Artificial Sequence
  Synthetic Oligonucleotide
agcctagtagtccatgtggtctctg

SEQ ID NO: 501 - DNA, 25 bp, Artificial Sequence
  Synthetic Oligonucleotide
catcaataagccaagtagtcgatgt

SEQ ID NO: 502 - DNA, 25 bp, Artificial Sequence
  Synthetic Oligonucleotide
cccgcgctcaacaatcgaccgacca

SEQ ID NO: 503 - DNA, 25 bp, Artificial Sequence
  Synthetic Oligonucleotide
gcggcatttagtaagctactcaacg

SEQ ID NO: 504 - DNA, 25 bp, Artificial Sequence
  Synthetic Oligonucleotide
agtaggaatcgccgcatttagttag

SEQ ID NO: 505 - DNA, 25 bp, Artificial Sequence
  Synthetic Oligonucleotide
catagagactggactcagtaggaat

SEQ ID NO: 506 - DNA, 25 bp, Artificial Sequence
  Synthetic Oligonucleotide
tctggtccggtcgatagagactggt

SEQ ID NO: 507 - DNA, 25 bp, Artificial Sequence
  Synthetic Oligonucleotide
ctgtgcccgtgagacaggtctggtc

SEQ ID NO: 508 - DNA, 25 bp, Artificial Sequence
  Synthetic Oligonucleotide
agagcgcgccgacgctgtgcccgtg

SEQ ID NO: 509 - DNA, 25 bp, Artificial Sequence
  Synthetic Oligonucleotide
tttgaggtcgcggccggtatagagc

SEQ ID NO: 510 - DNA, 25 bp, Artificial Sequence
  Synthetic Oligonucleotide
cgtactagaggcgataactttgagg

SEQ ID NO: 511 - DNA, 25 bp, Artificial Sequence
  Synthetic Oligonucleotide
ggtcggtggtcgtacgtactagagg

SEQ ID NO: 512 - DNA, 25 bp, Artificial Sequence
  Synthetic Oligonucleotide
tataaatgtaacgaggtcggtggtc

SEQ ID NO: 513 - DNA, 25 bp, Artificial Sequence
  Synthetic Oligonucleotide
atcaagtactgtaataaatgtaacc

SEQ ID NO: 514 - DNA, 25 bp, Artificial Sequence
  Synthetic Oligonucleotide
tccaatgcctatttcaagtactgtt

SEQ ID NO: 515 - DNA, 25 bp, Artificial Sequence
  Synthetic Oligonucleotide
cgcgtggtaacgcggacaaagtgat

SEQ ID NO: 516 - DNA, 25 bp, Artificial Sequence
  Synthetic Oligonucleotide
gttgaaatacaaattccgctgtaaa

SEQ ID NO: 517 - DNA, 25 bp, Artificial Sequence
  Synthetic Oligonucleotide
ttctgaaaccaaagggccttcgacg

SEQ ID NO: 518 - DNA, 25 bp, Artificial Sequence
  Synthetic Oligonucleotide
catgaaccaaaagaggttccgtacc

SEQ ID NO: 519 - DNA, 25 bp, Artificial Sequence
  Synthetic Oligonucleotide
tacagtgccacttatgcaagggccc

SEQ ID NO: 520 - DNA, 25 bp, Artificial Sequence
  Synthetic Oligonucleotide
tacgatgccacttatgcaagggccc

SEQ ID NO: 521 - DNA, 25 bp, Artificial Sequence
  Synthetic Oligonucleotide
taaagcccctcaggaagcatcaact

SEQ ID NO: 522 - DNA, 25 bp, Artificial Sequence
  Synthetic Oligonucleotide
taacatcaggctttcccatgccggt

SEQ ID NO: 523 - DNA, 25 bp, Artificial Sequence
  Synthetic Oligonucleotide
cggcacctgccacagcatgaacttg

SEQ ID NO: 524 - DNA, 25 bp, Artificial Sequence
  Synthetic Oligonucleotide
atcacttggtcatggcactcccttt

SEQ ID NO: 525 - DNA, 25 bp, Artificial Sequence
  Synthetic Oligonucleotide
agttcaagccagttgaaaacgcttt

SEQ ID NO: 526 - DNA, 25 bp, Artificial Sequence
  Synthetic Oligonucleotide
gactccagagcaagcaattgcctta

SEQ ID NO: 527 - DNA, 25 bp, Artificial Sequence
  Synthetic Oligonucleotide
gactccagagcaagcaattgcctta

SEQ ID NO: 528 - DNA, 25 bp, Artificial Sequence
  Synthetic Oligonucleotide
gactccagagcaagcaattgcctta

SEQ ID NO: 529 - DNA, 25 bp, Artificial Sequence
  Synthetic Oligonucleotide
gactccagagcaagcaattgcctta

SEQ ID NO: 530 - DNA, 25 bp, Artificial Sequence
  Synthetic Oligonucleotide
gactccagagcaagcaattgcctta

SEQ ID NO: 531 - DNA, 25 bp, Artificial Sequence
  Synthetic Oligonucleotide
gccccaaagtggtacaaccggtccg

SEQ ID NO: 532 - DNA, 25 bp, Artificial Sequence
  Synthetic Oligonucleotide
gactcccgtctgttcctttccgggg

SEQ ID NO: 533 - DNA, 25 bp, Artificial Sequence
  Synthetic Oligonucleotide
gatatctagtttggtcctttgttaa

SEQ ID NO: 534 - DNA, 25 bp, Artificial Sequence
  Synthetic Oligonucleotide
gtagggactttagtccttttttcca

SEQ ID NO: 535 - DNA, 25 bp, Artificial Sequence
  Synthetic Oligonucleotide
tgttgaagttttacctttatgtccc

SEQ ID NO: 536 - DNA, 25 bp, Artificial Sequence
  Synthetic Oligonucleotide
tcgtaagccctgcgcctagtaaacc

SEQ ID NO: 537 - DNA, 25 bp, Artificial Sequence
  Synthetic Oligonucleotide
acggtaaggccactcgaatggcaac

SEQ ID NO: 538 - DNA, 25 bp, Artificial Sequence
  Synthetic Oligonucleotide
cgaggtggcaaattccttcggcatc

SEQ ID NO: 539 - DNA, 25 bp, Artificial Sequence
  Synthetic Oligonucleotide
tctgcggcacggtcttccccgggaa

SEQ ID NO: 540 - DNA, 25 bp, Artificial Sequence
  Synthetic Oligonucleotide
ttccttctccggtcaaccaggtcaa

SEQ ID NO: 541 - DNA, 25 bp, Artificial Sequence
  Synthetic Oligonucleotide
ttagcttccaaacgaacggttcaaa

SEQ ID NO: 542 - DNA, 25 bp, Artificial Sequence
  Synthetic Oligonucleotide
tgagcccgccatgtaatattcgaaa

SEQ ID NO: 543 - DNA, 25 bp, Artificial Sequence
  Synthetic Oligonucleotide
tggtgggccaacgacatcggtttaa

SEQ ID NO: 544 - DNA, 25 bp, Artificial Sequence
  Synthetic Oligonucleotide
tgctttaggcaagaaggtcacatca

SEQ ID NO: 545 - DNA, 25 bp, Artificial Sequence
  Synthetic Oligonucleotide
ttcaaagggcaagagtcggaactga

SEQ ID NO: 546 - DNA, 25 bp, Artificial Sequence
  Synthetic Oligonucleotide
aactacttggtaagcggcacccagg

SEQ ID NO: 547 - DNA, 25 bp, Artificial Sequence
  Synthetic Oligonucleotide
tgcagaggtgtaagtcaatgcaatg

SEQ ID NO: 548 - DNA, 25 bp, Artificial Sequence
  Synthetic Oligonucleotide
ctaagaggtcgctggcaactttttg

SEQ ID NO: 549 - DNA, 25 bp, Artificial Sequence
  Synthetic Oligonucleotide
gcgaatatagatagcagcttctttt

SEQ ID NO: 550 - DNA, 25 bp, Artificial Sequence
  Synthetic Oligonucleotide
cgagatggtgactcgatttaggggt

SEQ ID NO: 551 - DNA, 25 bp, Artificial Sequence
  Synthetic Oligonucleotide
gcgagatggtgactcgatttagggg

SEQ ID NO: 552 - DNA, 25 bp, Artificial Sequence
  Synthetic Oligonucleotide
gcaggtaacggcttctaagggatga

SEQ ID NO: 553 - DNA, 25 bp, Artificial Sequence
  Synthetic Oligonucleotide
gtcacaaccgcatgttcaggaatgc

SEQ ID NO: 554 - DNA, 25 bp, Artificial Sequence
  Synthetic Oligonucleotide
taggctttcccatgccggtaggagc

SEQ ID NO: 555 - DNA, 25 bp, Artificial Sequence
  Synthetic Oligonucleotide
ttcctgttcccaacgcgagcaatgc

SEQ ID NO: 556 - DNA, 25 bp, Artificial Sequence
  Synthetic Oligonucleotide
gttaggtctgcctcatgaaagaaag

SEQ ID NO: 557 - DNA, 25 bp, Artificial Sequence
  Synthetic Oligonucleotide
tatggaaggaataggacctagaacc

SEQ ID NO: 558 - DNA, 25 bp, Artificial Sequence
  Synthetic Oligonucleotide
tatggaaggaataggacctagaacc

SEQ ID NO: 559 - DNA, 25 bp, Artificial Sequence
  Synthetic Oligonucleotide
gtcttgaaggaagtggcggaacatc

SEQ ID NO: 560 - DNA, 25 bp, Artificial Sequence
  Synthetic Oligonucleotide
cgtgctaaagggcgagccggcacca

SEQ ID NO: 561 - DNA, 25 bp, Artificial Sequence
  Synthetic Oligonucleotide
ctggtctccctgagggaccaggtca

SEQ ID NO: 562 - DNA, 25 bp, Artificial Sequence
  Synthetic Oligonucleotide
aggacttgccatcgtagaactgctg

SEQ ID NO: 563 - DNA, 25 bp, Artificial Sequence
  Synthetic Oligonucleotide
cagcagttctacgatggcaagtcct

SEQ ID NO: 564 - DNA, 25 bp, Artificial Sequence
  Synthetic Oligonucleotide
ctctggtcctaactgaattttctgg

SEQ ID NO: 565 - DNA, 25 bp, Artificial Sequence
  Synthetic Oligonucleotide
gcctgtgaacttctttataccaaaa

SEQ ID NO: 566 - DNA, 25 bp, Artificial Sequence
  Synthetic Oligonucleotide
gtaaaggaaggtctcccgaagcaaa

SEQ ID NO: 567 - DNA, 25 bp, Artificial Sequence
  Synthetic Oligonucleotide
gtaaaggaaggtctcccgaagcaaa

SEQ ID NO: 568 - DNA, 25 bp, Artificial Sequence
  Synthetic Oligonucleotide
gttgaaatacaatttccgctgtaaa

SEQ ID NO: 569 - DNA, 25 bp, Artificial Sequence
  Synthetic Oligonucleotide
ttctgaaaccaatgggccttcgacg

SEQ ID NO: 570 - DNA, 25 bp, Artificial Sequence
  Synthetic Oligonucleotide
catgaaccaaaacaggttccgtacc

SEQ ID NO: 571 - DNA, 25 bp, Artificial Sequence
  Synthetic Oligonucleotide
tacagtgccactaatgcaagggccc

SEQ ID NO: 572 - DNA, 25 bp, Artificial Sequence
  Synthetic Oligonucleotide
tacgatgccactaatgcaagggccc

SEQ ID NO: 573 - DNA, 25 bp, Artificial Sequence
  Synthetic Oligonucleotide
taaagcccctcacgaagcatcaact

SEQ ID NO: 574 - DNA, 25 bp, Artificial Sequence
  Synthetic Oligonucleotide
taacatcaggctatcccatgccggt

SEQ ID NO: 575 - DNA, 25 bp, Artificial Sequence
  Synthetic Oligonucleotide
cggcacctgccagagcatgaacttg

SEQ ID NO: 576 - DNA, 25 bp, Artificial Sequence
  Synthetic Oligonucleotide
atcacttggtcaaggcactcccttt

SEQ ID NO: 577 - DNA, 25 bp, Artificial Sequence
  Synthetic Oligonucleotide
agttcaagccagatgaaaacgcttt

SEQ ID NO: 578 - DNA, 25 bp, Artificial Sequence
  Synthetic Oligonucleotide
gactccagagcatgcaattgcctta

SEQ ID NO: 579 - DNA, 25 bp, Artificial Sequence
  Synthetic Oligonucleotide
gactccagagcatgcaattgcctta

SEQ ID NO: 580 - DNA, 25 bp, Artificial Sequence
  Synthetic Oligonucleotide
gactccagagcatgcaattgcctta

SEQ ID NO: 581 - DNA, 25 bp, Artificial Sequence
  Synthetic Oligonucleotide
gactccagagcatgcaattgcctta

SEQ ID NO: 582 - DNA, 25 bp, Artificial Sequence
  Synthetic Oligonucleotide
gactccagagcatgcaattgcctta

SEQ ID NO: 583 - DNA, 25 bp, Artificial Sequence
  Synthetic Oligonucleotide
gccccaaagtggaacaaccggtccg

SEQ ID NO: 584 - DNA, 25 bp, Artificial Sequence
  Synthetic Oligonucleotide
gactcccgtctgatcctttccgggg

SEQ ID NO: 585 - DNA, 25 bp, Artificial Sequence
  Synthetic Oligonucleotide
gatatctagtttcgtcctttgttaa

SEQ ID NO: 586 - DNA, 25 bp, Artificial Sequence
  Synthetic Oligonucleotide
gtagggactttactccttttttcca

SEQ ID NO: 587 - DNA, 25 bp, Artificial Sequence
  Synthetic Oligonucleotide
tgttgaagtttttcctttatgtccc

SEQ ID NO: 588 - DNA, 25 bp, Artificial Sequence
  Synthetic Oligonucleotide
tcgtaagccctgggcctagtaaacc

SEQ ID NO: 589 - DNA, 25 bp, Artificial Sequence
  Synthetic Oligonucleotide
acggtaaggccagtcgaatggcaac

SEQ ID NO: 590 - DNA, 25 bp, Artificial Sequence
  Synthetic Oligonucleotide
cgaggtggcaaaatccttcggcatc

SEQ ID NO: 591 - DNA, 25 bp, Artificial Sequence
  Synthetic Oligonucleotide
tctgcggcacggacttccccgggaa

SEQ ID NO: 592 - DNA, 25 bp, Artificial Sequence
  Synthetic Oligonucleotide
ttccttctccggacaaccaggtcaa

SEQ ID NO: 593 - DNA, 25 bp, Artificial Sequence
  Synthetic Oligonucleotide
ttagcttccaaaggaacggttcaaa

SEQ ID NO: 594 - DNA, 25 bp, Artificial Sequence
  Synthetic Oligonucleotide
tgagcccgccatctaatattcgaaa

SEQ ID NO: 595 - DNA, 25 bp, Artificial Sequence
  Synthetic Oligonucleotide
tggtgggccaaccacatcggtttaa

SEQ ID NO: 596 - DNA, 25 bp, Artificial Sequence
  Synthetic Oligonucleotide
tgctttaggcaacaaggtcacatca

SEQ ID NO: 597 - DNA, 25 bp, Artificial Sequence
  Synthetic Oligonucleotide
ttcaaagggcaacagtcggaactga

SEQ ID NO: 598 - DNA, 25 bp, Artificial Sequence
  Synthetic Oligonucleotide
aactacttggtatgcggcacccagg

SEQ ID NO: 599 - DNA, 25 bp, Artificial Sequence
  Synthetic Oligonucleotide
tgcagaggtgtatgtcaatgcaatg

SEQ ID NO: 600 - DNA, 25 bp, Artificial Sequence
  Synthetic Oligonucleotide
ctaagaggtcgcaggcaactttttg

SEQ ID NO: 601 - DNA, 25 bp, Artificial Sequence
  Synthetic Oligonucleotide
gcgaatatagattgcagcttctttt

SEQ ID NO: 602 - DNA, 25 bp, Artificial Sequence
  Synthetic Oligonucleotide
cgagatggtgacacgatttaggggt

SEQ ID NO: 603 - DNA, 25 bp, Artificial Sequence
  Synthetic Oligonucleotide
gcgagatggtgagtcgatttagggg

SEQ ID NO: 604 - DNA, 25 bp, Artificial Sequence
  Synthetic Oligonucleotide
gcaggtaacggcatctaagggatga

SEQ ID NO: 605 - DNA, 25 bp, Artificial Sequence
  Synthetic Oligonucleotide
gtcacaaccgcaagttcaggaatgc

SEQ ID NO: 606 - DNA, 25 bp, Artificial Sequence
  Synthetic Oligonucleotide
taggctttcccaagccggtaggagc

SEQ ID NO: 607 - DNA, 25 bp, Artificial Sequence
  Synthetic Oligonucleotide
ttcctgttcccatcgcgagcaatgc

SEQ ID NO: 608 - DNA, 25 bp, Artificial Sequence
  Synthetic Oligonucleotide
gttaggtctgccacatgaaagaaag

SEQ ID NO: 609 - DNA, 25 bp, Artificial Sequence
  Synthetic Oligonucleotide
tatggaaggaattggacctagaacc

SEQ ID NO: 610 - DNA, 25 bp, Artificial Sequence
  Synthetic Oligonucleotide
tatggaaggaattggacctagaacc

SEQ ID NO: 611 - DNA, 25 bp, Artificial Sequence
  Synthetic Oligonucleotide
gtcttgaaggaactggcggaacatc

SEQ ID NO: 612 - DNA, 25 bp, Artificial Sequence
  Synthetic Oligonucleotide
cgtgctaaagggggagccggcacca

SEQ ID NO: 613 - DNA, 25 bp, Artificial Sequence
  Synthetic Oligonucleotide
ctggtctccctgtgggaccaggtca

SEQ ID NO: 614 - DNA, 25 bp, Artificial Sequence
  Synthetic Oligonucleotide
cagcagttctacgatggcaagtcct

SEQ ID NO: 615 - DNA, 25 bp, Artificial Sequence
  Synthetic Oligonucleotide
aggacttgccatcgtagaactgctg

SEQ ID NO: 616 - DNA, 25 bp, Artificial Sequence
  Synthetic Oligonucleotide
gtccattaggatcttaagctttatt

SEQ ID NO: 617 - DNA, 25 bp, Artificial Sequence
  Synthetic Oligonucleotide
ctaattgttgatcttaaccatatgg

SEQ ID NO: 618 - DNA, 25 bp, Artificial Sequence
  Synthetic Oligonucleotide
cagagttatcccgattaccctttta

SEQ ID NO: 619 - DNA, 25 bp, Artificial Sequence
  Synthetic Oligonucleotide
gtgattacaatagttcatccctttg

SEQ ID NO: 620 - DNA, 25 bp, Artificial Sequence
  Synthetic Oligonucleotide
caaaaaggaagtacagtgcctgtta

SEQ ID NO: 621 - DNA, 25 bp, Artificial Sequence
  Synthetic Oligonucleotide
cacaaccgcatgttcaggaatgcct

SEQ ID NO: 622 - DNA, 25 bp, Artificial Sequence
  Synthetic Oligonucleotide
aggacttgccatcgtagaactgctg

SEQ ID NO: 623 - DNA, 25 bp, Artificial Sequence
  Synthetic Oligonucleotide
cagcagttctacgatggcaagtcct

SEQ ID NO: 624 - DNA, 25 bp, Artificial Sequence
  Synthetic Oligonucleotide
atagaagtggggaccctcctgctgt

SEQ ID NO: 625 - DNA, 25 bp, Artificial Sequence
  Synthetic Oligonucleotide
aatgaccggtggtgcctctgcctcg

SEQ ID NO: 626 - DNA, 25 bp, Artificial Sequence
  Synthetic Oligonucleotide
aacacataatggtgcttgtaggttc

SEQ ID NO: 627 - DNA, 25 bp, Artificial Sequence
  Synthetic Oligonucleotide
taccagtctgccagttctggcttac

SEQ ID NO: 628 - DNA, 25 bp, Artificial Sequence
  Synthetic Oligonucleotide
ttctcactagactcccttcaatttc

SEQ ID NO: 629 - DNA, 25 bp, Artificial Sequence
  Synthetic Oligonucleotide
tttcacagacctttttcatgtcctc

SEQ ID NO: 630 - DNA, 25 bp, Artificial Sequence
  Synthetic Oligonucleotide
agttgaagtagcacttaacatttca

SEQ ID NO: 631 - DNA, 25 bp, Artificial Sequence
  Synthetic Oligonucleotide
gttaattcctgcaagaacgtaatta

SEQ ID NO: 632 - DNA, 25 bp, Artificial Sequence
  Synthetic Oligonucleotide
atacaactgtccacatccaggatga

SEQ ID NO: 633 - DNA, 25 bp, Artificial Sequence
  Synthetic Oligonucleotide
taacaaattgaaaacccggtaggta

SEQ ID NO: 634 - DNA, 25 bp, Artificial Sequence
  Synthetic Oligonucleotide
ttcagcattgttccatcggcatagc

SEQ ID NO: 635 - DNA, 25 bp, Artificial Sequence
  Synthetic Oligonucleotide
aaccacttacttccgatctcaaacc

SEQ ID NO: 636 - DNA, 25 bp, Artificial Sequence
  Synthetic Oligonucleotide
gtcaaagccttgaattcactaaact

SEQ ID NO: 637 - DNA, 25 bp, Artificial Sequence
  Synthetic Oligonucleotide
tgacaagttataggaattcctaagc

SEQ ID NO: 638 - DNA, 25 bp, Artificial Sequence
  Synthetic Oligonucleotide
acttcaatttggagttcgttgactt

SEQ ID NO: 639 - DNA, 25 bp, Artificial Sequence
  Synthetic Oligonucleotide
tcataatcgatgtaatctgggactt

SEQ ID NO: 640 - DNA, 25 bp, Artificial Sequence
  Synthetic Oligonucleotide
gagatggtgactcgatttaggggtt

SEQ ID NO: 641 - DNA, 25 bp, Artificial Sequence
  Synthetic Oligonucleotide
ttataggtgtgttggttttaatgga

SEQ ID NO: 642 - DNA, 25 bp, Artificial Sequence
  Synthetic Oligonucleotide
tacgcagtcgtgatgtaagcgtagg

SEQ ID NO: 643 - DNA, 25 bp, Artificial Sequence
  Synthetic Oligonucleotide
ggagagcgcagcattatgattacgg

SEQ ID NO: 644 - DNA, 25 bp, Artificial Sequence
  Synthetic Oligonucleotide
aggacttgccatcgtagaactgctg

SEQ ID NO: 645 - DNA, 25 bp, Artificial Sequence
  Synthetic Oligonucleotide
cagcagttctacgatggcaagtcct

SEQ ID NO: 646 - DNA, 25 bp, Artificial Sequence
  Synthetic Oligonucleotide
ttgaccacctgtcattcaatcaagg

SEQ ID NO: 647 - DNA, 25 bp, Artificial Sequence
  Synthetic Oligonucleotide
gtctagtccttcttgaaatggttgt

SEQ ID NO: 648 - DNA, 25 bp, Artificial Sequence
  Synthetic Oligonucleotide
gttttgggtgtgtaaggatgtcttt

SEQ ID NO: 649 - DNA, 25 bp, Artificial Sequence
  Synthetic Oligonucleotide
gtattctggggtagaggcctatttg

SEQ ID NO: 650 - DNA, 25 bp, Artificial Sequence
  Synthetic Oligonucleotide
gtcttgggtatgtgcggccagtccc

SEQ ID NO: 651 - DNA, 25 bp, Artificial Sequence
  Synthetic Oligonucleotide
tctccaagcaggtgaggccaggaga

SEQ ID NO: 652 - DNA, 25 bp, Artificial Sequence
  Synthetic Oligonucleotide
cgccacttatgcaagggcccggaac

SEQ ID NO: 653 - DNA, 25 bp, Artificial Sequence
  Synthetic Oligonucleotide
catcgaggtggcaaattccttcggc

SEQ ID NO: 654 - DNA, 25 bp, Artificial Sequence
  Synthetic Oligonucleotide
atacagacctggaccattcaaaggg

SEQ ID NO: 655 - DNA, 25 bp, Artificial Sequence
  Synthetic Oligonucleotide
atacagacctggaccattcaaaggg

SEQ ID NO: 656 - DNA, 25 bp, Artificial Sequence
  Synthetic Oligonucleotide
atacagacctggaccattcaaaggg

SEQ ID NO: 657 - DNA, 25 bp, Artificial Sequence
  Synthetic Oligonucleotide
atacagacctggaccattcaaaggg

SEQ ID NO: 658 - DNA, 25 bp, Artificial Sequence
  Synthetic Oligonucleotide
atacagacctggaccattcaaaggg

SEQ ID NO: 659 - DNA, 25 bp, Artificial Sequence
  Synthetic Oligonucleotide
cacccatcacaagaaccacaaggtg

SEQ ID NO: 660 - DNA, 25 bp, Artificial Sequence
  Synthetic Oligonucleotide
cgagcttgtcttaggcccgccaatg

SEQ ID NO: 661 - DNA, 25 bp, Artificial Sequence
  Synthetic Oligonucleotide
gtgcttgaagagcagccccttgaag

SEQ ID NO: 662 - DNA, 25 bp, Artificial Sequence
  Synthetic Oligonucleotide
tgacttgatgacaccccatagttta

SEQ ID NO: 663 - DNA, 25 bp, Artificial Sequence
  Synthetic Oligonucleotide
agtagttcggataccacaatatttt

SEQ ID NO: 664 - DNA, 25 bp, Artificial Sequence
  Synthetic Oligonucleotide
gtggcctgtattgctacaatggcat

SEQ ID NO: 665 - DNA, 25 bp, Artificial Sequence
  Synthetic Oligonucleotide
tgcggcatttgctactcacgattca

SEQ ID NO: 666 - DNA, 25 bp, Artificial Sequence
  Synthetic Oligonucleotide
aggacttgccatcgtagaactgctg

SEQ ID NO: 667 - DNA, 25 bp, Artificial Sequence
  Synthetic Oligonucleotide
cagcagttctacgatggcaagtcct

SEQ ID NO: 668 - DNA, 25 bp, Artificial Sequence
  Synthetic Oligonucleotide
gaattcctatgtgtaatgtccattt

SEQ ID NO: 669 - DNA, 25 bp, Artificial Sequence
  Synthetic Oligonucleotide
aggggtagagaatcctagctgattg

SEQ ID NO: 670 - DNA, 25 bp, Artificial Sequence
  Synthetic Oligonucleotide
tggtacatcaactccagttacttcc

SEQ ID NO: 671 - DNA, 25 bp, Artificial Sequence
  Synthetic Oligonucleotide
taatgaataaactttccgattcttg

SEQ ID NO: 672 - DNA, 25 bp, Artificial Sequence
  Synthetic Oligonucleotide
gggaaacgaaacgtggtcattcttg

SEQ ID NO: 673 - DNA, 25 bp, Artificial Sequence
  Synthetic Oligonucleotide
gggcacaacccagtttaattcggcg

SEQ ID NO: 674 - DNA, 25 bp, Artificial Sequence
  Synthetic Oligonucleotide
gaccattcccagtcttccgttgttc

SEQ ID NO: 675 - DNA, 25 bp, Artificial Sequence
  Synthetic Oligonucleotide
agagtattcctagtcttccctcctt

SEQ ID NO: 676 - DNA, 25 bp, Artificial Sequence
  Synthetic Oligonucleotide
gaatcggtgtcacttcccttacctt

SEQ ID NO: 677 - DNA, 25 bp, Artificial Sequence
  Synthetic Oligonucleotide
cgggtatgggtgtatcatcccacca

SEQ ID NO: 678 - DNA, 25 bp, Artificial Sequence
  Synthetic Oligonucleotide
cggagcagcgggtgcatccttagaa

SEQ ID NO: 679 - DNA, 25 bp, Artificial Sequence
  Synthetic Oligonucleotide
cggagcagcgggtgcatccttagaa

SEQ ID NO: 680 - DNA, 25 bp, Artificial Sequence
  Synthetic Oligonucleotide
gagtcggagggctcatcgaccctaa

SEQ ID NO: 681 - DNA, 25 bp, Artificial Sequence
  Synthetic Oligonucleotide
tgaaggcagcggatttgccgctatc

SEQ ID NO: 682 - DNA, 25 bp, Artificial Sequence
  Synthetic Oligonucleotide
gtttaagtctggtattttcccctac

SEQ ID NO: 683 - DNA, 25 bp, Artificial Sequence
  Synthetic Oligonucleotide
gcatcgggtcggtcaattcccggtc

SEQ ID NO: 684 - DNA, 25 bp, Artificial Sequence
  Synthetic Oligonucleotide
ccagcttagcttgaacttgtccatc

SEQ ID NO: 685 - DNA, 25 bp, Artificial Sequence
  Synthetic Oligonucleotide
tcctgaaagctcgtaatttgaatct

SEQ ID NO: 686 - DNA, 25 bp, Artificial Sequence
  Synthetic Oligonucleotide
tggaacctatgtttacttatactta

SEQ ID NO: 687 - DNA, 25 bp, Artificial Sequence
  Synthetic Oligonucleotide
gtcgacaatgtcctgcttataacta

SEQ ID NO: 688 - DNA, 25 bp, Artificial Sequence
  Synthetic Oligonucleotide
aggacttgccatcgtagaactgctg

SEQ ID NO: 689 - DNA, 25 bp, Artificial Sequence
  Synthetic Oligonucleotide
cagcagttctacgatggcaagtcct

SEQ ID NO: 690 - DNA, 25 bp, Artificial Sequence
  Synthetic Oligonucleotide
ctgcaagtctgagacttgcgatttc

SEQ ID NO: 691 - DNA, 25 bp, Artificial Sequence
  Synthetic Oligonucleotide
tacgattgggaagatctgcatatcc

SEQ ID NO: 692 - DNA, 25 bp, Artificial Sequence
  Synthetic Oligonucleotide
gaggtcaggaacgacctgccaggta

SEQ ID NO: 693 - DNA, 25 bp, Artificial Sequence
  Synthetic Oligonucleotide
gaaccacagaaccagatggctgcta

SEQ ID NO: 694 - DNA, 25 bp, Artificial Sequence
  Synthetic Oligonucleotide
gttacaaaacatcacaaccttgtta

SEQ ID NO: 695 - DNA, 25 bp, Artificial Sequence
  Synthetic Oligonucleotide
gataaatgacctaacagccaagtta

SEQ ID NO: 696 - DNA, 25 bp, Artificial Sequence
  Synthetic Oligonucleotide
gggacaaagaggataggcccagcat

SEQ ID NO: 697 - DNA, 25 bp, Artificial Sequence
  Synthetic Oligonucleotide
ttgtagcacaagagcaggaaccaaa

SEQ ID NO: 698 - DNA, 25 bp, Artificial Sequence
  Synthetic Oligonucleotide
gctcatgacggagaggagtatcaaa

SEQ ID NO: 699 - DNA, 25 bp, Artificial Sequence
  Synthetic Oligonucleotide
cgacgtaccgacagcagtcgagcac

SEQ ID NO: 700 - DNA, 25 bp, Artificial Sequence
  Synthetic Oligonucleotide
acgtcggcgtaacggcactaggcct

SEQ ID NO: 701 - DNA, 25 bp, Artificial Sequence
  Synthetic Oligonucleotide
caagcaagtagacgagcgcaggccg

SEQ ID NO: 702 - DNA, 25 bp, Artificial Sequence
  Synthetic Oligonucleotide
gtgtcacacccactggggcagtggc

SEQ ID NO: 703 - DNA, 25 bp, Artificial Sequence
  Synthetic Oligonucleotide
tactttcaccaagtcgccaaatggg

SEQ ID NO: 704 - DNA, 25 bp, Artificial Sequence
  Synthetic Oligonucleotide
ttaaccttgctgcactcattgtggt

SEQ ID NO: 705 - DNA, 25 bp, Artificial Sequence
  Synthetic Oligonucleotide
ttaacccggacttttaggtatgtta

SEQ ID NO: 706 - DNA, 25 bp, Artificial Sequence
  Synthetic Oligonucleotide
cggacggtatttcgtgtagcggact

SEQ ID NO: 707 - DNA, 25 bp, Artificial Sequence
  Synthetic Oligonucleotide
gaatggccgcttcggtagagtggcg

SEQ ID NO: 708 - DNA, 25 bp, Artificial Sequence
  Synthetic Oligonucleotide
gttccgggcccttgcataagtggcg

SEQ ID NO: 709 - DNA, 25 bp, Artificial Sequence
  Synthetic Oligonucleotide
tccctgttgtttgtggtaaggtccg

SEQ ID NO: 710 - DNA, 25 bp, Artificial Sequence
  Synthetic Oligonucleotide
aggacttgccatcgtagaactgctg

SEQ ID NO: 711 - DNA, 25 bp, Artificial Sequence
  Synthetic Oligonucleotide
cagcagttctacgatggcaagtcct

SEQ ID NO: 712 - DNA, 25 bp, Artificial Sequence
  Synthetic Oligonucleotide
aggtggttgattcttgccggtacgt

SEQ ID NO: 713 - DNA, 25 bp, Artificial Sequence
  Synthetic Oligonucleotide
aggtggttgattcttgccggtacgt

SEQ ID NO: 714 - DNA, 25 bp, Artificial Sequence
  Synthetic Oligonucleotide
gatcatgatgagagcgggttcttgc

SEQ ID NO: 715 - DNA, 25 bp, Artificial Sequence
  Synthetic Oligonucleotide
accaagcggttctcggtgttcctga

SEQ ID NO: 716 - DNA, 25 bp, Artificial Sequence
  Synthetic Oligonucleotide
caggaaggtgctatggtttcaacag

SEQ ID NO: 717 - DNA, 25 bp, Artificial Sequence
  Synthetic Oligonucleotide
gtgaaggcgacgacatgcttggtaa

SEQ ID NO: 718 - DNA, 25 bp, Artificial Sequence
  Synthetic Oligonucleotide
ttaggtgcacctagcgcctgtcata

SEQ ID NO: 719 - DNA, 25 bp, Artificial Sequence
  Synthetic Oligonucleotide
tgtattgctacaatggcatattaag

SEQ ID NO: 720 - DNA, 25 bp, Artificial Sequence
  Synthetic Oligonucleotide
ctgtgttactaatccctagtgaata

SEQ ID NO: 721 - DNA, 25 bp, Artificial Sequence
  Synthetic Oligonucleotide
ctgtcatcgtacgtcagggtgttga

SEQ ID NO: 722 - DNA, 25 bp, Artificial Sequence
  Synthetic Oligonucleotide
cttctagcagcattgatgggttggt

SEQ ID NO: 723 - DNA, 25 bp, Artificial Sequence
  Synthetic Oligonucleotide
cttctagcggcattgatgggttggt

SEQ ID NO: 724 - DNA, 25 bp, Artificial Sequence
  Synthetic Oligonucleotide
ctctgcctttaggtagcgagctggt

SEQ ID NO: 725 - DNA, 25 bp, Artificial Sequence
  Synthetic Oligonucleotide
cctcataggcttgagcaatagcatg

SEQ ID NO: 726 - DNA, 25 bp, Artificial Sequence
  Synthetic Oligonucleotide
gtcccatttgtgtacaaatgctata

SEQ ID NO: 727 - DNA, 25 bp, Artificial Sequence
  Synthetic Oligonucleotide
gaagttttggttcaacgacttaatc

SEQ ID NO: 728 - DNA, 25 bp, Artificial Sequence
  Synthetic Oligonucleotide
gccgtccttggtcgatgatctacca

SEQ ID NO: 729 - DNA, 25 bp, Artificial Sequence
  Synthetic Oligonucleotide
gctacgccggggccctgtccagcat

SEQ ID NO: 730 - DNA, 25 bp, Artificial Sequence
  Synthetic Oligonucleotide
ggctaagggcgtcttgttgaccgaa

SEQ ID NO: 731 - DNA, 25 bp, Artificial Sequence
  Synthetic Oligonucleotide
tagacagtaactattggaaccgttc

SEQ ID NO: 732 - DNA, 25 bp, Artificial Sequence
  Synthetic Oligonucleotide
aggacttgccatcgtagaactgctg

SEQ ID NO: 733 - DNA, 25 bp, Artificial Sequence
  Synthetic Oligonucleotide
cagcagttctacgatggcaagtcct

SEQ ID NO: 734 - DNA, 25 bp, Artificial Sequence
  Synthetic Oligonucleotide
ttttactgtaacgttaagcggtcgt

SEQ ID NO: 735 - DNA, 25 bp, Artificial Sequence
  Synthetic Oligonucleotide
tagttgagtcagaactatataggtc

SEQ ID NO: 736 - DNA, 25 bp, Artificial Sequence
  Synthetic Oligonucleotide
gaatgttggaagtcgtctctggtcg

SEQ ID NO: 737 - DNA, 25 bp, Artificial Sequence
  Synthetic Oligonucleotide
cttcatcagaggtgctcgccttatg

SEQ ID NO: 738 - DNA, 25 bp, Artificial Sequence
  Synthetic Oligonucleotide
tcttaaagtggagatcgccgcgtta

SEQ ID NO: 739 - DNA, 25 bp, Artificial Sequence
  Synthetic Oligonucleotide
ttaatttgacgctcgctatgtacta

SEQ ID NO: 740 - DNA, 25 bp, Artificial Sequence
  Synthetic Oligonucleotide
aggacttgccatcgtagaactgctg

SEQ ID NO: 741 - DNA, 25 bp, Artificial Sequence
  Synthetic Oligonucleotide
cagcagttctacgatggcaagtcct

SEQ ID NO: 742 - DNA, 25 bp, Artificial Sequence
  Synthetic Oligonucleotide
gtccattaggatgttaagctttatt

SEQ ID NO: 743 - DNA, 25 bp, Artificial Sequence
  Synthetic Oligonucleotide
ctaattgttgatgttaaccatatgg

SEQ ID NO: 744 - DNA, 25 bp, Artificial Sequence
  Synthetic Oligonucleotide
cagagttatccccattaccctttta

SEQ ID NO: 745 - DNA, 25 bp, Artificial Sequence
  Synthetic Oligonucleotide
gtgattacaatacttcatccctttg

SEQ ID NO: 746 - DNA, 25 bp, Artificial Sequence
  Synthetic Oligonucleotide
caaaaaggaagttcagtgcctgtta

SEQ ID NO: 747 - DNA, 25 bp, Artificial Sequence
  Synthetic Oligonucleotide
cacaaccgcatgatcaggaatgcct

SEQ ID NO: 748 - DNA, 25 bp, Artificial Sequence
  Synthetic Oligonucleotide
cagcagttctacgatggcaagtcct

SEQ ID NO: 749 - DNA, 25 bp, Artificial Sequence
  Synthetic Oligonucleotide
aggacttgccatcgtagaactgctg

SEQ ID NO: 750 - DNA, 25 bp, Artificial Sequence
  Synthetic Oligonucleotide
atagaagtggggtccctcctgctgt

SEQ ID NO: 751 - DNA, 25 bp, Artificial Sequence
  Synthetic Oligonucleotide
aatgaccggtggagcctctgcctcg

SEQ ID NO: 752 - DNA, 25 bp, Artificial Sequence
  Synthetic Oligonucleotide
aacacataatggagcttgtaggttc

SEQ ID NO: 753 - DNA, 25 bp, Artificial Sequence
  Synthetic Oligonucleotide
taccagtctgcctgttctggcttac

SEQ ID NO: 754 - DNA, 25 bp, Artificial Sequence
  Synthetic Oligonucleotide
ttctcactagacacccttcaatttc

SEQ ID NO: 755 - DNA, 25 bp, Artificial Sequence
  Synthetic Oligonucleotide
tttcacagacctatttcatgtcctc

SEQ ID NO: 756 - DNA, 25 bp, Artificial Sequence
  Synthetic Oligonucleotide
agttgaagtagctcttaacatttca

SEQ ID NO: 757 - DNA, 25 bp, Artificial Sequence
  Synthetic Oligonucleotide
gttaattcctgctagaacgtaatta

SEQ ID NO: 758 - DNA, 25 bp, Artificial Sequence
  Synthetic Oligonucleotide
atacaactgtcctcatccaggatga

SEQ ID NO: 759 - DNA, 25 bp, Artificial Sequence
  Synthetic Oligonucleotide
taacaaattgaatacccggtaggta

SEQ ID NO: 760 - DNA, 25 bp, Artificial Sequence
  Synthetic Oligonucleotide
ttcagcattgttgcatcggcatagc

SEQ ID NO: 761 - DNA, 25 bp, Artificial Sequence
  Synthetic Oligonucleotide
aaccacttacttgcgatctcaaacc

SEQ ID NO: 762 - DNA, 25 bp, Artificial Sequence
  Synthetic Oligonucleotide
gtcaaagccttgtattcactaaact

SEQ ID NO: 763 - DNA, 25 bp, Artificial Sequence
  Synthetic Oligonucleotide
tgacaagttatacgaattcctaagc

SEQ ID NO: 764 - DNA, 25 bp, Artificial Sequence
  Synthetic Oligonucleotide
acttcaatttggtgttcgttgactt

SEQ ID NO: 765 - DNA, 25 bp, Artificial Sequence
  Synthetic Oligonucleotide
tcataatcgatgaaatctgggactt

SEQ ID NO: 766 - DNA, 25 bp, Artificial Sequence
  Synthetic Oligonucleotide
gagatggtgactggatttaggggtt

SEQ ID NO: 767 - DNA, 25 bp, Artificial Sequence
  Synthetic Oligonucleotide
ttataggtgtgtaggttttaatgga

SEQ ID NO: 768 - DNA, 25 bp, Artificial Sequence
  Synthetic Oligonucleotide
tacgcagtcgtgttgtaagcgtagg

SEQ ID NO: 769 - DNA, 25 bp, Artificial Sequence
  Synthetic Oligonucleotide
ggagagcgcagctttatgattacgg

SEQ ID NO: 770 - DNA, 25 bp, Artificial Sequence
  Synthetic Oligonucleotide
cagcagttctacgatggcaagtcct

SEQ ID NO: 771 - DNA, 25 bp, Artificial Sequence
  Synthetic Oligonucleotide
aggacttgccatcgtagaactgctg

SEQ ID NO: 772 - DNA, 25 bp, Artificial Sequence
  Synthetic Oligonucleotide
ttgaccacctgtgattcaatcaagg

SEQ ID NO: 773 - DNA, 25 bp, Artificial Sequence
  Synthetic Oligonucleotide
gtctagtccttcatgaaatggttgt

SEQ ID NO: 774 - DNA, 25 bp, Artificial Sequence
  Synthetic Oligonucleotide
gttttgggtgtgaaaggatgtcttt

SEQ ID NO: 775 - DNA, 25 bp, Artificial Sequence
  Synthetic Oligonucleotide
gtattctggggttgaggcctatttg

SEQ ID NO: 776 - DNA, 25 bp, Artificial Sequence
  Synthetic Oligonucleotide
gtcttgggtatgagcggccagtccc

SEQ ID NO: 777 - DNA, 25 bp, Artificial Sequence
  Synthetic Oligonucleotide
tctccaagcaggagaggccaggaga

SEQ ID NO: 778 - DNA, 25 bp, Artificial Sequence
  Synthetic Oligonucleotide
cgccacttatgctagggcccggaac

SEQ ID NO: 779 - DNA, 25 bp, Artificial Sequence
  Synthetic Oligonucleotide
catcgaggtggctaattccttcggc

SEQ ID NO: 780 - DNA, 25 bp, Artificial Sequence
  Synthetic Oligonucleotide
atacagacctggtccattcaaaggg

SEQ ID NO: 781 - DNA, 25 bp, Artificial Sequence
  Synthetic Oligonucleotide
atacagacctggtccattcaaaggg

SEQ ID NO: 782 - DNA, 25 bp, Artificial Sequence
  Synthetic Oligonucleotide
atacagacctggtccattcaaaggg

SEQ ID NO: 783 - DNA, 25 bp, Artificial Sequence
  Synthetic Oligonucleotide
atacagacctggtccattcaaaggg

SEQ ID NO: 784 - DNA, 25 bp, Artificial Sequence
  Synthetic Oligonucleotide
atacagacctggtccattcaaaggg

SEQ ID NO: 785 - DNA, 25 bp, Artificial Sequence
  Synthetic Oligonucleotide
cacccatcacaacaaccacaaggtg

SEQ ID NO: 786 - DNA, 25 bp, Artificial Sequence
  Synthetic Oligonucleotide
cgagcttgtctttggcccgccaatg

SEQ ID NO: 787 - DNA, 25 bp, Artificial Sequence
  Synthetic Oligonucleotide
gtgcttgaagaggagccccttgaag

SEQ ID NO: 788 - DNA, 25 bp, Artificial Sequence
  Synthetic Oligonucleotide
tgacttgatgactccccatagttta

SEQ ID NO: 789 - DNA, 25 bp, Artificial Sequence
  Synthetic Oligonucleotide
agtagttcggattccacaatatttt

SEQ ID NO: 790 - DNA, 25 bp, Artificial Sequence
  Synthetic Oligonucleotide
gtggcctgtattcctacaatggcat

SEQ ID NO: 791 - DNA, 25 bp, Artificial Sequence
  Synthetic Oligonucleotide
tgcggcatttgcaactcacgattca

SEQ ID NO: 792 - DNA, 25 bp, Artificial Sequence
  Synthetic Oligonucleotide
cagcagttctacgatggcaagtcct

SEQ ID NO: 793 - DNA, 25 bp, Artificial Sequence
  Synthetic Oligonucleotide
aggacttgccatcgtagaactgctg

SEQ ID NO: 794 - DNA, 25 bp, Artificial Sequence
  Synthetic Oligonucleotide
gaattcctatgtctaatgtccattt

SEQ ID NO: 795 - DNA, 25 bp, Artificial Sequence
  Synthetic Oligonucleotide
aggggtagagaaacctagctgattg

SEQ ID NO: 796 - DNA, 25 bp, Artificial Sequence
  Synthetic Oligonucleotide
tggtacatcaacaccagttacttcc

SEQ ID NO: 797 - DNA, 25 bp, Artificial Sequence
  Synthetic Oligonucleotide
taatgaataaacattccgattcttg

SEQ ID NO: 798 - DNA, 25 bp, Artificial Sequence
  Synthetic Oligonucleotide
gggaaacgaaacctggtcattcttg

SEQ ID NO: 799 - DNA, 25 bp, Artificial Sequence
  Synthetic Oligonucleotide
gggcacaacccactttaattcggcg

SEQ ID NO: 800 - DNA, 25 bp, Artificial Sequence
  Synthetic Oligonucleotide
gaccattcccagacttccgttgttc

SEQ ID NO: 801 - DNA, 25 bp, Artificial Sequence
  Synthetic Oligonucleotide
agagtattcctactcttccctcctt

SEQ ID NO: 802 - DNA, 25 bp, Artificial Sequence
  Synthetic Oligonucleotide
gaatcggtgtcagttcccttacctt

SEQ ID NO: 803 - DNA, 25 bp, Artificial Sequence
  Synthetic Oligonucleotide
cgggtatgggtgaatcatcccacca

SEQ ID NO: 804 - DNA, 25 bp, Artificial Sequence
  Synthetic Oligonucleotide
cggagcagcgggagcatccttagaa

SEQ ID NO: 805 - DNA, 25 bp, Artificial Sequence
  Synthetic Oligonucleotide
cggagcagcgggagcatccttagaa

SEQ ID NO: 806 - DNA, 25 bp, Artificial Sequence
  Synthetic Oligonucleotide
gagtcggagggcacatcgaccctaa

SEQ ID NO: 807 - DNA, 25 bp, Artificial Sequence
  Synthetic Oligonucleotide
tgaaggcagcggttttgccgctatc

SEQ ID NO: 808 - DNA, 25 bp, Artificial Sequence
  Synthetic Oligonucleotide
gtttaagtctggaattttcccctac

SEQ ID NO: 809 - DNA, 25 bp, Artificial Sequence
  Synthetic Oligonucleotide
gcatcgggtcggacaattcccggtc

SEQ ID NO: 810 - DNA, 25 bp, Artificial Sequence
  Synthetic Oligonucleotide
ccagcttagcttcaacttgtccatc

SEQ ID NO: 811 - DNA, 25 bp, Artificial Sequence
  Synthetic Oligonucleotide
tcctgaaagctcctaatttgaatct

SEQ ID NO: 812 - DNA, 25 bp, Artificial Sequence
  Synthetic Oligonucleotide
tggaacctatgtatacttatactta

SEQ ID NO: 813 - DNA, 25 bp, Artificial Sequence
  Synthetic Oligonucleotide
gtcgacaatgtcgtgcttataacta

SEQ ID NO: 814 - DNA, 25 bp, Artificial Sequence
  Synthetic Oligonucleotide
cagcagttctacgatggcaagtcct

SEQ ID NO: 815 - DNA, 25 bp, Artificial Sequence
  Synthetic Oligonucleotide
aggacttgccatcgtagaactgctg

SEQ ID NO: 816 - DNA, 25 bp, Artificial Sequence
  Synthetic Oligonucleotide
ctgcaagtctgacacttgcgatttc

SEQ ID NO: 817 - DNA, 25 bp, Artificial Sequence
  Synthetic Oligonucleotide
tacgattgggaacatctgcatatcc

SEQ ID NO: 818 - DNA, 25 bp, Artificial Sequence
  Synthetic Oligonucleotide
gaggtcaggaaccacctgccaggta

SEQ ID NO: 819 - DNA, 25 bp, Artificial Sequence
  Synthetic Oligonucleotide
gaaccacagaacgagatggctgcta

SEQ ID NO: 820 - DNA, 25 bp, Artificial Sequence
  Synthetic Oligonucleotide
gttacaaaacatgacaaccttgtta

SEQ ID NO: 821 - DNA, 25 bp, Artificial Sequence
  Synthetic Oligonucleotide
gataaatgaccttacagccaagtta

SEQ ID NO: 822 - DNA, 25 bp, Artificial Sequence
  Synthetic Oligonucleotide
gggacaaagaggttaggcccagcat

SEQ ID NO: 823 - DNA, 25 bp, Artificial Sequence
  Synthetic Oligonucleotide
ttgtagcacaagtgcaggaaccaaa

SEQ ID NO: 824 - DNA, 25 bp, Artificial Sequence
  Synthetic Oligonucleotide
gctcatgacggacaggagtatcaaa

SEQ ID NO: 825 - DNA, 25 bp, Artificial Sequence
  Synthetic Oligonucleotide
cgacgtaccgactgcagtcgagcac

SEQ ID NO: 826 - DNA, 25 bp, Artificial Sequence
  Synthetic Oligonucleotide
acgtcggcgtaagggcactaggcct

SEQ ID NO: 827 - DNA, 25 bp, Artificial Sequence
  Synthetic Oligonucleotide
caagcaagtagaggagcgcaggccg

SEQ ID NO: 828 - DNA, 25 bp, Artificial Sequence
  Synthetic Oligonucleotide
gtgtcacacccagtggggcagtggc

SEQ ID NO: 829 - DNA, 25 bp, Artificial Sequence
  Synthetic Oligonucleotide
tactttcaccaactcgccaaatggg

SEQ ID NO: 830 - DNA, 25 bp, Artificial Sequence
  Synthetic Oligonucleotide
ttaaccttgctggactcattgtggt

SEQ ID NO: 831 - DNA, 25 bp, Artificial Sequence
  Synthetic Oligonucleotide
ttaacccggactattaggtatgtta

SEQ ID NO: 832 - DNA, 25 bp, Artificial Sequence
  Synthetic Oligonucleotide
cggacggtatttggtgtagcggact

SEQ ID NO: 833 - DNA, 25 bp, Artificial Sequence
  Synthetic Oligonucleotide
gaatggccgcttgggtagagtggcg

SEQ ID NO: 834 - DNA, 25 bp, Artificial Sequence
  Synthetic Oligonucleotide
gttccgggccctagcataagtggcg

SEQ ID NO: 835 - DNA, 25 bp, Artificial Sequence
  Synthetic Oligonucleotide
tccctgttgtttctggtaaggtccg

SEQ ID NO: 836 - DNA, 25 bp, Artificial Sequence
  Synthetic Oligonucleotide
cagcagttctacgatggcaagtcct

SEQ ID NO: 837 - DNA, 25 bp, Artificial Sequence
  Synthetic Oligonucleotide
aggacttgccatcgtagaactgctg

SEQ ID NO: 838 - DNA, 25 bp, Artificial Sequence
  Synthetic Oligonucleotide
aggtggttgattgttgccggtacgt

SEQ ID NO: 839 - DNA, 25 bp, Artificial Sequence
  Synthetic Oligonucleotide
aggtggttgattgttgccggtacgt

SEQ ID NO: 840 - DNA, 25 bp, Artificial Sequence
  Synthetic Oligonucleotide
gatcatgatgagtgcgggttcttgc

SEQ ID NO: 841 - DNA, 25 bp, Artificial Sequence
  Synthetic Oligonucleotide
accaagcggttcacggtgttcctga

SEQ ID NO: 842 - DNA, 25 bp, Artificial Sequence
  Synthetic Oligonucleotide
caggaaggtgctttggtttcaacag

SEQ ID NO: 843 - DNA, 25 bp, Artificial Sequence
  Synthetic Oligonucleotide
gtgaaggcgacgtcatgcttggtaa

SEQ ID NO: 844 - DNA, 25 bp, Artificial Sequence
  Synthetic Oligonucleotide
ttaggtgcaccttgcgcctgtcata

SEQ ID NO: 845 - DNA, 25 bp, Artificial Sequence
  Synthetic Oligonucleotide
tgtattgctacattggcatattaag

SEQ ID NO: 846 - DNA, 25 bp, Artificial Sequence
  Synthetic Oligonucleotide
ctgtgttactaaaccctagtgaata

SEQ ID NO: 847 - DNA, 25 bp, Artificial Sequence
  Synthetic Oligonucleotide
ctgtcatcgtacctcagggtgttga

SEQ ID NO: 848 - DNA, 25 bp, Artificial Sequence
  Synthetic Oligonucleotide
cttctagcagcaatgatgggttggt

SEQ ID NO: 849 - DNA, 25 bp, Artificial Sequence
  Synthetic Oligonucleotide
cttctagcggcaatgatgggttggt

SEQ ID NO: 850 - DNA, 25 bp, Artificial Sequence
  Synthetic Oligonucleotide
ctctgcctttagctagcgagctggt

SEQ ID NO: 851 - DNA, 25 bp, Artificial Sequence
  Synthetic Oligonucleotide
cctcataggcttcagcaatagcatg

SEQ ID NO: 852 - DNA, 25 bp, Artificial Sequence
  Synthetic Oligonucleotide
gtcccatttgtgaacaaatgctata

SEQ ID NO: 853 - DNA, 25 bp, Artificial Sequence
  Synthetic Oligonucleotide
gaagttttggttgaacgacttaatc

SEQ ID NO: 854 - DNA, 25 bp, Artificial Sequence
  Synthetic Oligonucleotide
gccgtccttggtggatgatctacca

SEQ ID NO: 855 - DNA, 25 bp, Artificial Sequence
  Synthetic Oligonucleotide
gctacgccgggggcctgtccagcat

SEQ ID NO: 856 - DNA, 25 bp, Artificial Sequence
  Synthetic Oligonucleotide
ggctaagggcgtgttgttgaccgaa

SEQ ID NO: 857 - DNA, 25 bp, Artificial Sequence
  Synthetic Oligonucleotide
tagacagtaacttttggaaccgttc

SEQ ID NO: 858 - DNA, 25 bp, Artificial Sequence
  Synthetic Oligonucleotide
cagcagttctacgatggcaagtcct

SEQ ID NO: 859 - DNA, 25 bp, Artificial Sequence
  Synthetic Oligonucleotide
aggacttgccatcgtagaactgctg

SEQ ID NO: 860 - DNA, 25 bp, Artificial Sequence
  Synthetic Oligonucleotide
ttttactgtaaccttaagcggtcgt

SEQ ID NO: 861 - DNA, 25 bp, Artificial Sequence
  Synthetic Oligonucleotide
tagttgagtcagtactatataggtc

SEQ ID NO: 862 - DNA, 25 bp, Artificial Sequence
  Synthetic Oligonucleotide
gaatgttggaagacgtctctggtcg

SEQ ID NO: 863 - DNA, 25 bp, Artificial Sequence
  Synthetic Oligonucleotide
cttcatcagaggagctcgccttatg

SEQ ID NO: 864 - DNA, 25 bp, Artificial Sequence
  Synthetic Oligonucleotide
tcttaaagtggacatcgccgcgtta

SEQ ID NO: 865 - DNA, 25 bp, Artificial Sequence
  Synthetic Oligonucleotide
ttaatttgacgcacgctatgtacta

SEQ ID NO: 866 - DNA, 25 bp, Artificial Sequence
  Synthetic Oligonucleotide
cagcagttctacgatggcaagtcct

SEQ ID NO: 867 - DNA, 25 bp, Artificial Sequence
  Synthetic Oligonucleotide
aggacttgccatcgtagaactgctg

SEQ ID NO: 868 - DNA, 25 bp, Artificial Sequence
  Synthetic Oligonucleotide
aggtcacggcagaggggcccacttt

SEQ ID NO: 869 - DNA, 25 bp, Artificial Sequence
  Synthetic Oligonucleotide
ttagggtacctgttgggccatgtct

SEQ ID NO: 870 - DNA, 25 bp, Artificial Sequence
  Synthetic Oligonucleotide
tcgctggcaactttttgcttgctct

SEQ ID NO: 871 - DNA, 25 bp, Artificial Sequence
  Synthetic Oligonucleotide
ggtcgctggcaactttttgcttgct

SEQ ID NO: 872 - DNA, 25 bp, Artificial Sequence
  Synthetic Oligonucleotide
acctgccggctgttatcttcctttt

SEQ ID NO: 873 - DNA, 25 bp, Artificial Sequence
  Synthetic Oligonucleotide
tccagccggttgttatgaccctttc

SEQ ID NO: 874 - DNA, 25 bp, Artificial Sequence
  Synthetic Oligonucleotide
taccagacagggtcataaaccccag

SEQ ID NO: 875 - DNA, 25 bp, Artificial Sequence
  Synthetic Oligonucleotide
accaggcagttgtcagaaaacccac

SEQ ID NO: 876 - DNA, 25 bp, Artificial Sequence
  Synthetic Oligonucleotide
tcaagacatatttggccacctgccg

SEQ ID NO: 877 - DNA, 25 bp, Artificial Sequence
  Synthetic Oligonucleotide
ggacaaaaacttaggggttcttccg

SEQ ID NO: 878 - DNA, 25 bp, Artificial Sequence
  Synthetic Oligonucleotide
aggacttgccatcgtagaactgctg

SEQ ID NO: 879 - DNA, 25 bp, Artificial Sequence
  Synthetic Oligonucleotide
cagcagttctacgatggcaagtcct

SEQ ID NO: 880 - DNA, 25 bp, Artificial Sequence
  Synthetic Oligonucleotide
cagcagttctacgatggcaagtcct

SEQ ID NO: 881 - DNA, 25 bp, Artificial Sequence
  Synthetic Oligonucleotide
cagcagttctacgatggcaagtcct

SEQ ID NO: 882 - DNA, 25 bp, Artificial Sequence
  Synthetic Oligonucleotide
aggacttgccatcgtagaactgctg

SEQ ID NO: 883 - DNA, 25 bp, Artificial Sequence
  Synthetic Oligonucleotide
aggacttgccatcgtagaactgctg

SEQ ID NO: 884 - DNA, 25 bp, Artificial Sequence
  Synthetic Oligonucleotide
aggacttgccatcgtagaactgctg

SEQ ID NO: 885 - DNA, 25 bp, Artificial Sequence
  Synthetic Oligonucleotide
aggacttgccatcgtagaactgctg

SEQ ID NO: 886 - DNA, 25 bp, Artificial Sequence
  Synthetic Oligonucleotide
aggacttgccatcgtagaactgctg

SEQ ID NO: 887 - DNA, 25 bp, Artificial Sequence
  Synthetic Oligonucleotide
aggacttgccatcgtagaactgctg

SEQ ID NO: 888 - DNA, 25 bp, Artificial Sequence
  Synthetic Oligonucleotide
aggacttgccatcgtagaactgctg

SEQ ID NO: 889 - DNA, 25 bp, Artificial Sequence
  Synthetic Oligonucleotide
aggacttgccatcgtagaactgctg

SEQ ID NO: 890 - DNA, 25 bp, Artificial Sequence
  Synthetic Oligonucleotide
aggacttgccatcgtagaactgctg

SEQ ID NO: 891 - DNA, 25 bp, Artificial Sequence
  Synthetic Oligonucleotide
aggacttgccatcgtagaactgctg

SEQ ID NO: 892 - DNA, 25 bp, Artificial Sequence
  Synthetic Oligonucleotide
aggacttgccatcgtagaactgctg

SEQ ID NO: 893 - DNA, 25 bp, Artificial Sequence
  Synthetic Oligonucleotide
aggacttgccatcgtagaactgctg

SEQ ID NO: 894 - DNA, 25 bp, Artificial Sequence
  Synthetic Oligonucleotide
aggacttgccatcgtagaactgctg

SEQ ID NO: 895 - DNA, 25 bp, Artificial Sequence
  Synthetic Oligonucleotide
aggacttgccatcgtagaactgctg

SEQ ID NO: 896 - DNA, 25 bp, Artificial Sequence
  Synthetic Oligonucleotide
aggacttgccatcgtagaactgctg

SEQ ID NO: 897 - DNA, 25 bp, Artificial Sequence
  Synthetic Oligonucleotide
aggacttgccatcgtagaactgctg

SEQ ID NO: 898 - DNA, 25 bp, Artificial Sequence
  Synthetic Oligonucleotide
aggacttgccatcgtagaactgctg

SEQ ID NO: 899 - DNA, 25 bp, Artificial Sequence
  Synthetic Oligonucleotide
cagcagttctacgatggcaagtcct

SEQ ID NO: 900 - DNA, 25 bp, Artificial Sequence
  Synthetic Oligonucleotide
cagcagttctacgatggcaagtcct

SEQ ID NO: 901 - DNA, 25 bp, Artificial Sequence
  Synthetic Oligonucleotide
cagcagttctacgatggcaagtcct

SEQ ID NO: 902 - DNA, 25 bp, Artificial Sequence
  Synthetic Oligonucleotide
aggacttgccatcgtagaactgctg

SEQ ID NO: 903 - DNA, 25 bp, Artificial Sequence
  Synthetic Oligonucleotide
cagcagttctacgatggcaagtcct

SEQ ID NO: 904 - DNA, 25 bp, Artificial Sequence
  Synthetic Oligonucleotide
aggacttgccatcgtagaactgctg

SEQ ID NO: 905 - DNA, 25 bp, Artificial Sequence
  Synthetic Oligonucleotide
aggacttgccatcgtagaactgctg

SEQ ID NO: 906 - DNA, 25 bp, Artificial Sequence
  Synthetic Oligonucleotide
aggacttgccatcgtagaactgctg

SEQ ID NO: 907 - DNA, 25 bp, Artificial Sequence
  Synthetic Oligonucleotide
aggacttgccatcgtagaactgctg

SEQ ID NO: 908 - DNA, 25 bp, Artificial Sequence
  Synthetic Oligonucleotide
aggacttgccatcgtagaactgctg

SEQ ID NO: 909 - DNA, 25 bp, Artificial Sequence
  Synthetic Oligonucleotide
aggacttgccatcgtagaactgctg

SEQ ID NO: 910 - DNA, 25 bp, Artificial Sequence
  Synthetic Oligonucleotide
aggacttgccatcgtagaactgctg

SEQ ID NO: 911 - DNA, 25 bp, Artificial Sequence
  Synthetic Oligonucleotide
aggacttgccatcgtagaactgctg

SEQ ID NO: 912 - DNA, 25 bp, Artificial Sequence
  Synthetic Oligonucleotide
aggacttgccatcgtagaactgctg

SEQ ID NO: 913 - DNA, 25 bp, Artificial Sequence
  Synthetic Oligonucleotide
aggacttgccatcgtagaactgctg

SEQ ID NO: 914 - DNA, 25 bp, Artificial Sequence
  Synthetic Oligonucleotide
aggacttgccatcgtagaactgctg

SEQ ID NO: 915 - DNA, 25 bp, Artificial Sequence
  Synthetic Oligonucleotide
aggacttgccatcgtagaactgctg

SEQ ID NO: 916 - DNA, 25 bp, Artificial Sequence
  Synthetic Oligonucleotide
aggacttgccatcgtagaactgctg

SEQ ID NO: 917 - DNA, 25 bp, Artificial Sequence
  Synthetic Oligonucleotide
aggacttgccatcgtagaactgctg

SEQ ID NO: 918 - DNA, 25 bp, Artificial Sequence
  Synthetic Oligonucleotide
gccagggaaacctggtcaggagctt

SEQ ID NO: 919 - DNA, 25 bp, Artificial Sequence
  Synthetic Oligonucleotide
gtgttgaaaccctggaatcgaccgc

SEQ ID NO: 920 - DNA, 25 bp, Artificial Sequence
  Synthetic Oligonucleotide
aaatgatagccgaggtatgttccct

SEQ ID NO: 921 - DNA, 25 bp, Artificial Sequence
  Synthetic Oligonucleotide
gcattgaacccgagtgttgatgatt

SEQ ID NO: 922 - DNA, 25 bp, Artificial Sequence
  Synthetic Oligonucleotide
cagcagttctacgatggcaagtcct

SEQ ID NO: 923 - DNA, 25 bp, Artificial Sequence
  Synthetic Oligonucleotide
cagcagttctacgatggcaagtcct

SEQ ID NO: 924 - DNA, 25 bp, Artificial Sequence
  Synthetic Oligonucleotide
cagcagttctacgatggcaagtcct

SEQ ID NO: 925 - DNA, 25 bp, Artificial Sequence
  Synthetic Oligonucleotide
cagcagttctacgatggcaagtcct

SEQ ID NO: 926 - DNA, 25 bp, Artificial Sequence
  Synthetic Oligonucleotide
cagcagttctacgatggcaagtcct

SEQ ID NO: 927 - DNA, 25 bp, Artificial Sequence
  Synthetic Oligonucleotide
cagcagttctacgatggcaagtcct

SEQ ID NO: 928 - DNA, 25 bp, Artificial Sequence
  Synthetic Oligonucleotide
cagcagttctacgatggcaagtcct

SEQ ID NO: 929 - DNA, 25 bp, Artificial Sequence
  Synthetic Oligonucleotide
cagcagttctacgatggcaagtcct

SEQ ID NO: 930 - DNA, 25 bp, Artificial Sequence
  Synthetic Oligonucleotide
cagcagttctacgatggcaagtcct

SEQ ID NO: 931 - DNA, 25 bp, Artificial Sequence
  Synthetic Oligonucleotide
cagcagttctacgatggcaagtcct

SEQ ID NO: 932 - DNA, 25 bp, Artificial Sequence
  Synthetic Oligonucleotide
aggacttgccatcgtagaactgctg

SEQ ID NO: 933 - DNA, 25 bp, Artificial Sequence
  Synthetic Oligonucleotide
cagcagttctacgatggcaagtcct

SEQ ID NO: 934 - DNA, 25 bp, Artificial Sequence
  Synthetic Oligonucleotide
cagcagttctacgatggcaagtcct

SEQ ID NO: 935 - DNA, 25 bp, Artificial Sequence
  Synthetic Oligonucleotide
cagcagttctacgatggcaagtcct

SEQ ID NO: 936 - DNA, 25 bp, Artificial Sequence
  Synthetic Oligonucleotide
cagcagttctacgatggcaagtcct

SEQ ID NO: 937 - DNA, 25 bp, Artificial Sequence
  Synthetic Oligonucleotide
cagcagttctacgatggcaagtcct

SEQ ID NO: 938 - DNA, 25 bp, Artificial Sequence
  Synthetic Oligonucleotide
cagcagttctacgatggcaagtcct

SEQ ID NO: 939 - DNA, 25 bp, Artificial Sequence
  Synthetic Oligonucleotide
cagcagttctacgatggcaagtcct

SEQ ID NO: 940 - DNA, 25 bp, Artificial Sequence
  Synthetic Oligonucleotide
cagcagttctacgatggcaagtcct

SEQ ID NO: 941 - DNA, 25 bp, Artificial Sequence
  Synthetic Oligonucleotide
cagcagttctacgatggcaagtcct

SEQ ID NO: 942 - DNA, 25 bp, Artificial Sequence
  Synthetic Oligonucleotide
aggacttgccatcgtagaactgctg

SEQ ID NO: 943 - DNA, 25 bp, Artificial Sequence
  Synthetic Oligonucleotide
cagcagttctacgatggcaagtcct

SEQ ID NO: 944 - DNA, 25 bp, Artificial Sequence
  Synthetic Oligonucleotide
cagcagttctacgatggcaagtcct

SEQ ID NO: 945 - DNA, 25 bp, Artificial Sequence
  Synthetic Oligonucleotide
aggacttgccatcgtagaactgctg

SEQ ID NO: 946 - DNA, 25 bp, Artificial Sequence
  Synthetic Oligonucleotide
aggacttgccatcgtagaactgctg

SEQ ID NO: 947 - DNA, 25 bp, Artificial Sequence
  Synthetic Oligonucleotide
aggtggttgattcttgccggtacgt

SEQ ID NO: 948 - DNA, 25 bp, Artificial Sequence
  Synthetic Oligonucleotide
aggtggttgattcttgccggtacgt

SEQ ID NO: 949 - DNA, 25 bp, Artificial Sequence
  Synthetic Oligonucleotide
tcatcggtaaaggttaggtccaaag

SEQ ID NO: 950 - DNA, 25 bp, Artificial Sequence
  Synthetic Oligonucleotide
cgaaccgcaaccaacaggttcaaat

SEQ ID NO: 951 - DNA, 25 bp, Artificial Sequence
  Synthetic Oligonucleotide
aatcgagatcttaatggtgtcaata

SEQ ID NO: 952 - DNA, 25 bp, Artificial Sequence
  Synthetic Oligonucleotide
gaatcacggttacattaattcaagc

SEQ ID NO: 953 - DNA, 25 bp, Artificial Sequence
  Synthetic Oligonucleotide
gggagcagtgttatttctatccccc

SEQ ID NO: 954 - DNA, 25 bp, Artificial Sequence
  Synthetic Oligonucleotide
ggttatgttaatcttaacgtttcct

SEQ ID NO: 955 - DNA, 25 bp, Artificial Sequence
  Synthetic Oligonucleotide
tagggttgatcgtaattgtctcccc

SEQ ID NO: 956 - DNA, 25 bp, Artificial Sequence
  Synthetic Oligonucleotide
tatttttgtcactgtaatggcccct

SEQ ID NO: 957 - DNA, 25 bp, Artificial Sequence
  Synthetic Oligonucleotide
gttgtttggataaaaatcaccacct

SEQ ID NO: 958 - DNA, 25 bp, Artificial Sequence
  Synthetic Oligonucleotide
tttgttgagctgagaagcttccgtg

SEQ ID NO: 959 - DNA, 25 bp, Artificial Sequence
  Synthetic Oligonucleotide
tccatctaggtctcagaagcattgg

SEQ ID NO: 960 - DNA, 25 bp, Artificial Sequence
  Synthetic Oligonucleotide
cacttagccgttgcagtaaagtggg

SEQ ID NO: 961 - DNA, 25 bp, Artificial Sequence
  Synthetic Oligonucleotide
gcgtccttgggaaccagaaagccgc

SEQ ID NO: 962 - DNA, 25 bp, Artificial Sequence
  Synthetic Oligonucleotide
tcgttacaggaatcaggactccctc

SEQ ID NO: 963 - DNA, 25 bp, Artificial Sequence
  Synthetic Oligonucleotide
gacatgtcccggtccaggatcttca

SEQ ID NO: 964 - DNA, 25 bp, Artificial Sequence
  Synthetic Oligonucleotide
gctatgccgatggaacaatgctgaa

SEQ ID NO: 965 - DNA, 25 bp, Artificial Sequence
  Synthetic Oligonucleotide
cgggctgatgacgaatcttcgtgaa

SEQ ID NO: 966 - DNA, 25 bp, Artificial Sequence
  Synthetic Oligonucleotide
aggctagctgctcatgcttccgctc

SEQ ID NO: 967 - DNA, 25 bp, Artificial Sequence
  Synthetic Oligonucleotide
taagttagccatcatcgctgcccgc

SEQ ID NO: 968 - DNA, 25 bp, Artificial Sequence
  Synthetic Oligonucleotide
gttacggcctgagcctgaccgagtt

SEQ ID NO: 969 - DNA, 25 bp, Artificial Sequence
  Synthetic Oligonucleotide
agtactcgctttacccgtaccgcta

SEQ ID NO: 970 - DNA, 25 bp, Artificial Sequence
  Synthetic Oligonucleotide
gatagaacttttttgctgacaacta

SEQ ID NO: 971 - DNA, 25 bp, Artificial Sequence
  Synthetic Oligonucleotide
ataagacattgtctggtttcaagtc

SEQ ID NO: 972 - DNA, 25 bp, Artificial Sequence
  Synthetic Oligonucleotide
aaggtataagggtttgtcgaaaaga

SEQ ID NO: 973 - DNA, 25 bp, Artificial Sequence
  Synthetic Oligonucleotide
caaaggagacttgaccgagagagta

SEQ ID NO: 974 - DNA, 25 bp, Artificial Sequence
  Synthetic Oligonucleotide
gtaacctctagacctccaaggacta

SEQ ID NO: 975 - DNA, 25 bp, Artificial Sequence
  Synthetic Oligonucleotide
aggacttgccatcgtagaactgctg

SEQ ID NO: 976 - DNA, 25 bp, Artificial Sequence
  Synthetic Oligonucleotide
cagcagttctacgatggcaagtcct

SEQ ID NO: 977 - DNA, 25 bp, Artificial Sequence
  Synthetic Oligonucleotide
aggtcacggcagtggggcccacttt

SEQ ID NO: 978 - DNA, 25 bp, Artificial Sequence
  Synthetic Oligonucleotide
ttagggtacctgatgggccatgtct

SEQ ID NO: 979 - DNA, 25 bp, Artificial Sequence
  Synthetic Oligonucleotide
tcgctggcaactatttgcttgctct

SEQ ID NO: 980 - DNA, 25 bp, Artificial Sequence
  Synthetic Oligonucleotide
ggtcgctggcaagtttttgcttgct

SEQ ID NO: 981 - DNA, 25 bp, Artificial Sequence
  Synthetic Oligonucleotide
acctgccggctgatatcttcctttt

SEQ ID NO: 982 - DNA, 25 bp, Artificial Sequence
  Synthetic Oligonucleotide
tccagccggttgatatgaccctttc

SEQ ID NO: 983 - DNA, 25 bp, Artificial Sequence
  Synthetic Oligonucleotide
taccagacagggacataaaccccag

SEQ ID NO: 984 - DNA, 25 bp, Artificial Sequence
  Synthetic Oligonucleotide
accaggcagttgacagaaaacccac

SEQ ID NO: 985 - DNA, 25 bp, Artificial Sequence
  Synthetic Oligonucleotide
tcaagacatattaggccacctgccg

SEQ ID NO: 986 - DNA, 25 bp, Artificial Sequence
  Synthetic Oligonucleotide
ggacaaaaactttggggttcttccg

SEQ ID NO: 987 - DNA, 25 bp, Artificial Sequence
  Synthetic Oligonucleotide
cagcagttctacgatggcaagtcct

SEQ ID NO: 988 - DNA, 25 bp, Artificial Sequence
  Synthetic Oligonucleotide
aggacttgccatcgtagaactgctg

SEQ ID NO: 989 - DNA, 25 bp, Artificial Sequence
  Synthetic Oligonucleotide
aggacttgccatcgtagaactgctg

SEQ ID NO: 990 - DNA, 25 bp, Artificial Sequence
  Synthetic Oligonucleotide
aggacttgccatcgtagaactgctg

SEQ ID NO: 991 - DNA, 25 bp, Artificial Sequence
  Synthetic Oligonucleotide
cagcagttctacgatggcaagtcct

SEQ ID NO: 992 - DNA, 25 bp, Artificial Sequence
  Synthetic Oligonucleotide
aggacttgccatcgtagaactgctg

SEQ ID NO: 993 - DNA, 25 bp, Artificial Sequence
  Synthetic Oligonucleotide
aggacttgccatcgtagaactgctg

SEQ ID NO: 994 - DNA, 25 bp, Artificial Sequence
  Synthetic Oligonucleotide
aggacttgccatcgtagaactgctg

SEQ ID NO: 995 - DNA, 25 bp, Artificial Sequence
  Synthetic Oligonucleotide
aggacttgccatcgtagaactgctg

SEQ ID NO: 996 - DNA, 25 bp, Artificial Sequence
  Synthetic Oligonucleotide
aggacttgccatcgtagaactgctg

SEQ ID NO: 997 - DNA, 25 bp, Artificial Sequence
  Synthetic Oligonucleotide
aggacttgccatcgtagaactgctg

SEQ ID NO: 998 - DNA, 25 bp, Artificial Sequence
  Synthetic Oligonucleotide
aggacttgccatcgtagaactgctg

SEQ ID NO: 999 - DNA, 25 bp, Artificial Sequence
  Synthetic Oligonucleotide
aggacttgccatcgtagaactgctg

SEQ ID NO: 1000 - DNA, 25 bp, Artificial Sequence
  Synthetic Oligonucleotide
aggacttgccatcgtagaactgctg

SEQ ID NO: 1001 - DNA, 25 bp, Artificial Sequence
  Synthetic Oligonucleotide
aggacttgccatcgtagaactgctg

SEQ ID NO: 1002 - DNA, 25 bp, Artificial Sequence
  Synthetic Oligonucleotide
aggacttgccatcgtagaactgctg

SEQ ID NO: 1003 - DNA, 25 bp, Artificial Sequence
  Synthetic Oligonucleotide
aggacttgccatcgtagaactgctg

SEQ ID NO: 1004 - DNA, 25 bp, Artificial Sequence
  Synthetic Oligonucleotide
aggacttgccatcgtagaactgctg

SEQ ID NO: 1005 - DNA, 25 bp, Artificial Sequence
  Synthetic Oligonucleotide
aggacttgccatcgtagaactgctg

SEQ ID NO: 1006 - DNA, 25 bp, Artificial Sequence
  Synthetic Oligonucleotide
aggacttgccatcgtagaactgctg

SEQ ID NO: 1007 - DNA, 25 bp, Artificial Sequence
  Synthetic Oligonucleotide
cagcagttctacgatggcaagtcct

SEQ ID NO: 1008 - DNA, 25 bp, Artificial Sequence
  Synthetic Oligonucleotide
aggacttgccatcgtagaactgctg

SEQ ID NO: 1009 - DNA, 25 bp, Artificial Sequence
  Synthetic Oligonucleotide
aggacttgccatcgtagaactgctg

SEQ ID NO: 1010 - DNA, 25 bp, Artificial Sequence
  Synthetic Oligonucleotide
aggacttgccatcgtagaactgctg

SEQ ID NO: 1011 - DNA, 25 bp, Artificial Sequence
  Synthetic Oligonucleotide
cagcagttctacgatggcaagtcct

SEQ ID NO: 1012 - DNA, 25 bp, Artificial Sequence
  Synthetic Oligonucleotide
cagcagttctacgatggcaagtcct

SEQ ID NO: 1013 - DNA, 25 bp, Artificial Sequence
  Synthetic Oligonucleotide
aggacttgccatcgtagaactgctg

SEQ ID NO: 1014 - DNA, 25 bp, Artificial Sequence
  Synthetic Oligonucleotide
aggacttgccatcgtagaactgctg

SEQ ID NO: 1015 - DNA, 25 bp, Artificial Sequence
  Synthetic Oligonucleotide
aggacttgccatcgtagaactgctg

SEQ ID NO: 1016 - DNA, 25 bp, Artificial Sequence
  Synthetic Oligonucleotide
aggacttgccatcgtagaactgctg

SEQ ID NO: 1017 - DNA, 25 bp, Artificial Sequence
  Synthetic Oligonucleotide
aggacttgccatcgtagaactgctg

SEQ ID NO: 1018 - DNA, 25 bp, Artificial Sequence
  Synthetic Oligonucleotide
aggacttgccatcgtagaactgctg

SEQ ID NO: 1019 - DNA, 25 bp, Artificial Sequence
  Synthetic Oligonucleotide
aggacttgccatcgtagaactgctg

SEQ ID NO: 1020 - DNA, 25 bp, Artificial Sequence
  Synthetic Oligonucleotide
aggacttgccatcgtagaactgctg

SEQ ID NO: 1021 - DNA, 25 bp, Artificial Sequence
  Synthetic Oligonucleotide
aggacttgccatcgtagaactgctg

SEQ ID NO: 1022 - DNA, 25 bp, Artificial Sequence
  Synthetic Oligonucleotide
aggacttgccatcgtagaactgctg

SEQ ID NO: 1023 - DNA, 25 bp, Artificial Sequence
  Synthetic Oligonucleotide
aggacttgccatcgtagaactgctg

SEQ ID NO: 1024 - DNA, 25 bp, Artificial Sequence
  Synthetic Oligonucleotide
aggacttgccatcgtagaactgctg

SEQ ID NO: 1025 - DNA, 25 bp, Artificial Sequence
  Synthetic Oligonucleotide
aggacttgccatcgtagaactgctg

SEQ ID NO: 1026 - DNA, 25 bp, Artificial Sequence
  Synthetic Oligonucleotide
aggacttgccatcgtagaactgctg

SEQ ID NO: 1027 - DNA, 25 bp, Artificial Sequence
  Synthetic Oligonucleotide
gccagggaaaccaggtcaggagctt

SEQ ID NO: 1028 - DNA, 25 bp, Artificial Sequence
  Synthetic Oligonucleotide
gtgttgaaacccaggaatcgaccgc

SEQ ID NO: 1029 - DNA, 25 bp, Artificial Sequence
  Synthetic Oligonucleotide
aaatgatagccgtggtatgttccct

SEQ ID NO: 1030 - DNA, 25 bp, Artificial Sequence
  Synthetic Oligonucleotide
gcattgaacccgtgtgttgatgatt

SEQ ID NO: 1031 - DNA, 25 bp, Artificial Sequence
  Synthetic Oligonucleotide
aggacttgccatcgtagaactgctg

SEQ ID NO: 1032 - DNA, 25 bp, Artificial Sequence
  Synthetic Oligonucleotide
aggacttgccatcgtagaactgctg

SEQ ID NO: 1033 - DNA, 25 bp, Artificial Sequence
  Synthetic Oligonucleotide
cagcagttctacgatggcaagtcct

SEQ ID NO: 1034 - DNA, 25 bp, Artificial Sequence
  Synthetic Oligonucleotide
aggacttgccatcgtagaactgctg

SEQ ID NO: 1035 - DNA, 25 bp, Artificial Sequence
  Synthetic Oligonucleotide
aggacttgccatcgtagaactgctg

SEQ ID NO: 1036 - DNA, 25 bp, Artificial Sequence
  Synthetic Oligonucleotide
cagcagttctacgatggcaagtcct

SEQ ID NO: 1037 - DNA, 25 bp, Artificial Sequence
  Synthetic Oligonucleotide
aggacttgccatcgtagaactgctg

SEQ ID NO: 1038 - DNA, 25 bp, Artificial Sequence
  Synthetic Oligonucleotide
aggacttgccatcgtagaactgctg

SEQ ID NO: 1039 - DNA, 25 bp, Artificial Sequence
  Synthetic Oligonucleotide
aggacttgccatcgtagaactgctg

SEQ ID NO: 1040 - DNA, 25 bp, Artificial Sequence
  Synthetic Oligonucleotide
aggacttgccatcgtagaactgctg

SEQ ID NO: 1041 - DNA, 25 bp, Artificial Sequence
  Synthetic Oligonucleotide
cagcagttctacgatggcaagtcct

SEQ ID NO: 1042 - DNA, 25 bp, Artificial Sequence
  Synthetic Oligonucleotide
aggacttgccatcgtagaactgctg

SEQ ID NO: 1043 - DNA, 25 bp, Artificial Sequence
  Synthetic Oligonucleotide
aggacttgccatcgtagaactgctg

SEQ ID NO: 1044 - DNA, 25 bp, Artificial Sequence
  Synthetic Oligonucleotide
aggacttgccatcgtagaactgctg

SEQ ID NO: 1045 - DNA, 25 bp, Artificial Sequence
  Synthetic Oligonucleotide
aggacttgccatcgtagaactgctg

SEQ ID NO: 1046 - DNA, 25 bp, Artificial Sequence
  Synthetic Oligonucleotide
aggacttgccatcgtagaactgctg

SEQ ID NO: 1047 - DNA, 25 bp, Artificial Sequence
  Synthetic Oligonucleotide
aggacttgccatcgtagaactgctg

SEQ ID NO: 1048 - DNA, 25 bp, Artificial Sequence
  Synthetic Oligonucleotide
cagcagttctacgatggcaagtcct

SEQ ID NO: 1049 - DNA, 25 bp, Artificial Sequence
  Synthetic Oligonucleotide
aggacttgccatcgtagaactgctg

SEQ ID NO: 1050 - DNA, 25 bp, Artificial Sequence
  Synthetic Oligonucleotide
aggacttgccatcgtagaactgctg

SEQ ID NO: 1051 - DNA, 25 bp, Artificial Sequence
  Synthetic Oligonucleotide
cagcagttctacgatggcaagtcct

SEQ ID NO: 1052 - DNA, 25 bp, Artificial Sequence
  Synthetic Oligonucleotide
aggacttgccatcgtagaactgctg

SEQ ID NO: 1053 - DNA, 25 bp, Artificial Sequence
  Synthetic Oligonucleotide
aggacttgccatcgtagaactgctg

SEQ ID NO: 1054 - DNA, 25 bp, Artificial Sequence
  Synthetic Oligonucleotide
cagcagttctacgatggcaagtcct

SEQ ID NO: 1055 - DNA, 25 bp, Artificial Sequence
  Synthetic Oligonucleotide
aggacttgccatcgtagaactgctg

SEQ ID NO: 1056 - DNA, 25 bp, Artificial Sequence
  Synthetic Oligonucleotide
aggtggttgattgttgccggtacgt

SEQ ID NO: 1057 - DNA, 25 bp, Artificial Sequence
  Synthetic Oligonucleotide
aggtggttgattgttgccggtacgt

SEQ ID NO: 1058 - DNA, 25 bp, Artificial Sequence
  Synthetic Oligonucleotide
tcatcggtaaagcttaggtccaaag

SEQ ID NO: 1059 - DNA, 25 bp, Artificial Sequence
  Synthetic Oligonucleotide
cgaaccgcaacctacaggttcaaat

SEQ ID NO: 1060 - DNA, 25 bp, Artificial Sequence
  Synthetic Oligonucleotide
aatcgagatctttatggtgtcaata

SEQ ID NO: 1061 - DNA, 25 bp, Artificial Sequence
  Synthetic Oligonucleotide
gaatcacggttagattaattcaagc

SEQ ID NO: 1062 - DNA, 25 bp, Artificial Sequence
  Synthetic Oligonucleotide
gggagcagtgttttttctatccccc

SEQ ID NO: 1063 - DNA, 25 bp, Artificial Sequence
  Synthetic Oligonucleotide
ggttatgttaatgttaacgtttcct

SEQ ID NO: 1064 - DNA, 25 bp, Artificial Sequence
  Synthetic Oligonucleotide
tagggttgatcgaaattgtctcccc

SEQ ID NO: 1065 - DNA, 25 bp, Artificial Sequence
  Synthetic Oligonucleotide
tatttttgtcacagtaatggcccct

SEQ ID NO: 1066 - DNA, 25 bp, Artificial Sequence
  Synthetic Oligonucleotide
gttgtttggatataaatcaccacct

SEQ ID NO: 1067 - DNA, 25 bp, Artificial Sequence
  Synthetic Oligonucleotide
tttgttgagctgtgaagcttccgtg

SEQ ID NO: 1068 - DNA, 25 bp, Artificial Sequence
  Synthetic Oligonucleotide
tccatctaggtcacagaagcattgg

SEQ ID NO: 1069 - DNA, 25 bp, Artificial Sequence
  Synthetic Oligonucleotide
cacttagccgttccagtaaagtggg

SEQ ID NO: 1070 - DNA, 25 bp, Artificial Sequence
  Synthetic Oligonucleotide
gcgtccttgggatccagaaagccgc

SEQ ID NO: 1071 - DNA, 25 bp, Artificial Sequence
  Synthetic Oligonucleotide
tcgttacaggaaacaggactccctc

SEQ ID NO: 1072 - DNA, 25 bp, Artificial Sequence
  Synthetic Oligonucleotide
gacatgtcccggaccaggatcttca

SEQ ID NO: 1073 - DNA, 25 bp, Artificial Sequence
  Synthetic Oligonucleotide
gctatgccgatgcaacaatgctgaa

SEQ ID NO: 1074 - DNA, 25 bp, Artificial Sequence
  Synthetic Oligonucleotide
cgggctgatgaccaatcttcgtgaa

SEQ ID NO: 1075 - DNA, 25 bp, Artificial Sequence
  Synthetic Oligonucleotide
aggctagctgctgatgcttccgctc

SEQ ID NO: 1076 - DNA, 25 bp, Artificial Sequence
  Synthetic Oligonucleotide
taagttagccatgatcgctgcccgc

SEQ ID NO: 1077 - DNA, 25 bp, Artificial Sequence
  Synthetic Oligonucleotide
gttacggcctgaccctgaccgagtt

SEQ ID NO: 1078 - DNA, 25 bp, Artificial Sequence
  Synthetic Oligonucleotide
agtactcgcttttcccgtaccgcta

SEQ ID NO: 1079 - DNA, 25 bp, Artificial Sequence
  Synthetic Oligonucleotide
gatagaacttttatgctgacaacta

SEQ ID NO: 1080 - DNA, 25 bp, Artificial Sequence
  Synthetic Oligonucleotide
ataagacattgtgtggtttcaagtc

SEQ ID NO: 1081 - DNA, 25 bp, Artificial Sequence
  Synthetic Oligonucleotide
aaggtataagggattgtcgaaaaga

SEQ ID NO: 1082 - DNA, 25 bp, Artificial Sequence
  Synthetic Oligonucleotide
caaaggagacttcaccgagagagta

SEQ ID NO: 1083 - DNA, 25 bp, Artificial Sequence
  Synthetic Oligonucleotide
gtaacctctagagctccaaggacta

SEQ ID NO: 1084 - DNA, 25 bp, Artificial Sequence
  Synthetic Oligonucleotide
cagcagttctacgatggcaagtcct

SEQ ID NO: 1085 - DNA, 25 bp, Artificial Sequence
  Synthetic Oligonucleotide
aggacttgccatcgtagaactgctg

SEQ ID NO: 1086 - DNA, 25 bp, Artificial Sequence
  Synthetic Oligonucleotide
tgcaggcctctggagtgatttatta

SEQ ID NO: 1087 - DNA, 25 bp, Artificial Sequence
  Synthetic Oligonucleotide
gggaatctacttctgaagtccttta

SEQ ID NO: 1088 - DNA, 25 bp, Artificial Sequence
  Synthetic Oligonucleotide
gaggaggcgcttctgcttcttgctc

SEQ ID NO: 1089 - DNA, 25 bp, Artificial Sequence
  Synthetic Oligonucleotide
gtaggggtcctttcttccaaccttc

SEQ ID NO: 1090 - DNA, 25 bp, Artificial Sequence
  Synthetic Oligonucleotide
taggggtcctttcttccaaccttct

SEQ ID NO: 1091 - DNA, 25 bp, Artificial Sequence
  Synthetic Oligonucleotide
tggggtgctggtctggtttaccttt

SEQ ID NO: 1092 - DNA, 25 bp, Artificial Sequence
  Synthetic Oligonucleotide
ggcaatagttattggtttcgtcgtt

SEQ ID NO: 1093 - DNA, 25 bp, Artificial Sequence
  Synthetic Oligonucleotide
acgagggagattgtggaattccgta

SEQ ID NO: 1094 - DNA, 25 bp, Artificial Sequence
  Synthetic Oligonucleotide
acaaccgcatgttcaggaatgccta

SEQ ID NO: 1095 - DNA, 25 bp, Artificial Sequence
  Synthetic Oligonucleotide
accaaaacaagtttgtggtatggca

SEQ ID NO: 1096 - DNA, 25 bp, Artificial Sequence
  Synthetic Oligonucleotide
cagcagttctacgatggcaagtcct

SEQ ID NO: 1097 - DNA, 25 bp, Artificial Sequence
  Synthetic Oligonucleotide
aggacttgccatcgtagaactgctg

SEQ ID NO: 1098 - DNA, 25 bp, Artificial Sequence
  Synthetic Oligonucleotide
aggacttgccatcgtagaactgctg

SEQ ID NO: 1099 - DNA, 25 bp, Artificial Sequence
  Synthetic Oligonucleotide
aggacttgccatcgtagaactgctg

SEQ ID NO: 1100 - DNA, 25 bp, Artificial Sequence
  Synthetic Oligonucleotide
aggacttgccatcgtagaactgctg

SEQ ID NO: 1101 - DNA, 25 bp, Artificial Sequence
  Synthetic Oligonucleotide
aggacttgccatcgtagaactgctg

SEQ ID NO: 1102 - DNA, 25 bp, Artificial Sequence
  Synthetic Oligonucleotide
cagcagttctacgatggcaagtcct

SEQ ID NO: 1103 - DNA, 25 bp, Artificial Sequence
  Synthetic Oligonucleotide
cagcagttctacgatggcaagtcct

SEQ ID NO: 1104 - DNA, 25 bp, Artificial Sequence
  Synthetic Oligonucleotide
cagcagttctacgatggcaagtcct

SEQ ID NO: 1105 - DNA, 25 bp, Artificial Sequence
  Synthetic Oligonucleotide
aggacttgccatcgtagaactgctg

SEQ ID NO: 1106 - DNA, 25 bp, Artificial Sequence
  Synthetic Oligonucleotide
cagcagttctacgatggcaagtcct

SEQ ID NO: 1107 - DNA, 25 bp, Artificial Sequence
  Synthetic Oligonucleotide
aggacttgccatcgtagaactgctg

SEQ ID NO: 1108 - DNA, 25 bp, Artificial Sequence
  Synthetic Oligonucleotide
cagcagttctacgatggcaagtcct

SEQ ID NO: 1109 - DNA, 25 bp, Artificial Sequence
  Synthetic Oligonucleotide
cagcagttctacgatggcaagtcct

SEQ ID NO: 1110 - DNA, 25 bp, Artificial Sequence
  Synthetic Oligonucleotide
aggacttgccatcgtagaactgctg

SEQ ID NO: 1111 - DNA, 25 bp, Artificial Sequence
  Synthetic Oligonucleotide
aggacttgccatcgtagaactgctg

SEQ ID NO: 1112 - DNA, 25 bp, Artificial Sequence
  Synthetic Oligonucleotide
cagcagttctacgatggcaagtcct

SEQ ID NO: 1113 - DNA, 25 bp, Artificial Sequence
  Synthetic Oligonucleotide
cagcagttctacgatggcaagtcct

SEQ ID NO: 1114 - DNA, 25 bp, Artificial Sequence
  Synthetic Oligonucleotide
cagcagttctacgatggcaagtcct

SEQ ID NO: 1115 - DNA, 25 bp, Artificial Sequence
  Synthetic Oligonucleotide
aggacttgccatcgtagaactgctg

SEQ ID NO: 1116 - DNA, 25 bp, Artificial Sequence
  Synthetic Oligonucleotide
cagcagttctacgatggcaagtcct

SEQ ID NO: 1117 - DNA, 25 bp, Artificial Sequence
  Synthetic Oligonucleotide
aggacttgccatcgtagaactgctg

SEQ ID NO: 1118 - DNA, 25 bp, Artificial Sequence
  Synthetic Oligonucleotide
aggacttgccatcgtagaactgctg

SEQ ID NO: 1119 - DNA, 25 bp, Artificial Sequence
  Synthetic Oligonucleotide
aggacttgccatcgtagaactgctg

SEQ ID NO: 1120 - DNA, 25 bp, Artificial Sequence
  Synthetic Oligonucleotide
aggacttgccatcgtagaactgctg

SEQ ID NO: 1121 - DNA, 25 bp, Artificial Sequence
  Synthetic Oligonucleotide
cagcagttctacgatggcaagtcct

SEQ ID NO: 1122 - DNA, 25 bp, Artificial Sequence
  Synthetic Oligonucleotide
aggacttgccatcgtagaactgctg

SEQ ID NO: 1123 - DNA, 25 bp, Artificial Sequence
  Synthetic Oligonucleotide
cagcagttctacgatggcaagtcct

SEQ ID NO: 1124 - DNA, 25 bp, Artificial Sequence
  Synthetic Oligonucleotide
cagcagttctacgatggcaagtcct

SEQ ID NO: 1125 - DNA, 25 bp, Artificial Sequence
  Synthetic Oligonucleotide
aggacttgccatcgtagaactgctg

SEQ ID NO: 1126 - DNA, 25 bp, Artificial Sequence
  Synthetic Oligonucleotide
aggacttgccatcgtagaactgctg

SEQ ID NO: 1127 - DNA, 25 bp, Artificial Sequence
  Synthetic Oligonucleotide
aggacttgccatcgtagaactgctg

SEQ ID NO: 1128 - DNA, 25 bp, Artificial Sequence
  Synthetic Oligonucleotide
cagcagttctacgatggcaagtcct

SEQ ID NO: 1129 - DNA, 25 bp, Artificial Sequence
  Synthetic Oligonucleotide
aggacttgccatcgtagaactgctg

SEQ ID NO: 1130 - DNA, 25 bp, Artificial Sequence
  Synthetic Oligonucleotide
aggacttgccatcgtagaactgctg

SEQ ID NO: 1131 - DNA, 25 bp, Artificial Sequence
  Synthetic Oligonucleotide
cagcagttctacgatggcaagtcct

SEQ ID NO: 1132 - DNA, 25 bp, Artificial Sequence
  Synthetic Oligonucleotide
cagcagttctacgatggcaagtcct

SEQ ID NO: 1133 - DNA, 25 bp, Artificial Sequence
  Synthetic Oligonucleotide
cagcagttctacgatggcaagtcct

SEQ ID NO: 1134 - DNA, 25 bp, Artificial Sequence
  Synthetic Oligonucleotide
aggacttgccatcgtagaactgctg

SEQ ID NO: 1135 - DNA, 25 bp, Artificial Sequence
  Synthetic Oligonucleotide
aggacttgccatcgtagaactgctg

SEQ ID NO: 1136 - DNA, 25 bp, Artificial Sequence
  Synthetic Oligonucleotide
agcagaggctgcatgctcaggaaga

SEQ ID NO: 1137 - DNA, 25 bp, Artificial Sequence
  Synthetic Oligonucleotide
gcttaggcaactaaggctaggatta

SEQ ID NO: 1138 - DNA, 25 bp, Artificial Sequence
  Synthetic Oligonucleotide
ccaagaggttttacaggtgtgctta

SEQ ID NO: 1139 - DNA, 25 bp, Artificial Sequence
  Synthetic Oligonucleotide
ccaatgtcatttgtgatgagtcttt

SEQ ID NO: 1140 - DNA, 25 bp, Artificial Sequence
  Synthetic Oligonucleotide
aggacttgccatcgtagaactgctg

SEQ ID NO: 1141 - DNA, 25 bp, Artificial Sequence
  Synthetic Oligonucleotide
aggacttgccatcgtagaactgctg

SEQ ID NO: 1142 - DNA, 25 bp, Artificial Sequence
  Synthetic Oligonucleotide
cagcagttctacgatggcaagtcct

SEQ ID NO: 1143 - DNA, 25 bp, Artificial Sequence
  Synthetic Oligonucleotide
aggacttgccatcgtagaactgctg

SEQ ID NO: 1144 - DNA, 25 bp, Artificial Sequence
  Synthetic Oligonucleotide
aggacttgccatcgtagaactgctg

SEQ ID NO: 1145 - DNA, 25 bp, Artificial Sequence
  Synthetic Oligonucleotide
cagcagttctacgatggcaagtcct

SEQ ID NO: 1146 - DNA, 25 bp, Artificial Sequence
  Synthetic Oligonucleotide
aggacttgccatcgtagaactgctg

SEQ ID NO: 1147 - DNA, 25 bp, Artificial Sequence
  Synthetic Oligonucleotide
aggacttgccatcgtagaactgctg

SEQ ID NO: 1148 - DNA, 25 bp, Artificial Sequence
  Synthetic Oligonucleotide
aggacttgccatcgtagaactgctg

SEQ ID NO: 1149 - DNA, 25 bp, Artificial Sequence
  Synthetic Oligonucleotide
aggacttgccatcgtagaactgctg

SEQ ID NO: 1150 - DNA, 25 bp, Artificial Sequence
  Synthetic Oligonucleotide
cagcagttctacgatggcaagtcct

SEQ ID NO: 1151 - DNA, 25 bp, Artificial Sequence
  Synthetic Oligonucleotide
aggacttgccatcgtagaactgctg

SEQ ID NO: 1152 - DNA, 25 bp, Artificial Sequence
  Synthetic Oligonucleotide
aggacttgccatcgtagaactgctg

SEQ ID NO: 1153 - DNA, 25 bp, Artificial Sequence
  Synthetic Oligonucleotide
aggacttgccatcgtagaactgctg

SEQ ID NO: 1154 - DNA, 25 bp, Artificial Sequence
  Synthetic Oligonucleotide
aggacttgccatcgtagaactgctg

SEQ ID NO: 1155 - DNA, 25 bp, Artificial Sequence
  Synthetic Oligonucleotide
aggacttgccatcgtagaactgctg

SEQ ID NO: 1156 - DNA, 25 bp, Artificial Sequence
  Synthetic Oligonucleotide
aggacttgccatcgtagaactgctg

SEQ ID NO: 1157 - DNA, 25 bp, Artificial Sequence
  Synthetic Oligonucleotide
cagcagttctacgatggcaagtcct

SEQ ID NO: 1158 - DNA, 25 bp, Artificial Sequence
  Synthetic Oligonucleotide
aggacttgccatcgtagaactgctg

SEQ ID NO: 1159 - DNA, 25 bp, Artificial Sequence
  Synthetic Oligonucleotide
aggacttgccatcgtagaactgctg

SEQ ID NO: 1160 - DNA, 25 bp, Artificial Sequence
  Synthetic Oligonucleotide
aggacttgccatcgtagaactgctg

SEQ ID NO: 1161 - DNA, 25 bp, Artificial Sequence
  Synthetic Oligonucleotide
aggacttgccatcgtagaactgctg

SEQ ID NO: 1162 - DNA, 25 bp, Artificial Sequence
  Synthetic Oligonucleotide
aggacttgccatcgtagaactgctg

SEQ ID NO: 1163 - DNA, 25 bp, Artificial Sequence
  Synthetic Oligonucleotide
cagcagttctacgatggcaagtcct

SEQ ID NO: 1164 - DNA, 25 bp, Artificial Sequence
  Synthetic Oligonucleotide
aggacttgccatcgtagaactgctg

SEQ ID NO: 1165 - DNA, 25 bp, Artificial Sequence
  Synthetic Oligonucleotide
aggtggttgattcttgccggtacgt

SEQ ID NO: 1166 - DNA, 25 bp, Artificial Sequence
  Synthetic Oligonucleotide
aggtggttgattcttgccggtacgt

SEQ ID NO: 1167 - DNA, 25 bp, Artificial Sequence
  Synthetic Oligonucleotide
aaatgtgtatggtcttggcaatagt

SEQ ID NO: 1168 - DNA, 25 bp, Artificial Sequence
  Synthetic Oligonucleotide
aaaaggtcggctctgggtcgaagta

SEQ ID NO: 1169 - DNA, 25 bp, Artificial Sequence
  Synthetic Oligonucleotide
gaaagggtttcctgggagtaagagc

SEQ ID NO: 1170 - DNA, 25 bp, Artificial Sequence
  Synthetic Oligonucleotide
ttgctcttcgacgactggtaggagc

SEQ ID NO: 1171 - DNA, 25 bp, Artificial Sequence
  Synthetic Oligonucleotide
ccttttctcggagtcccgtagcctt

SEQ ID NO: 1172 - DNA, 25 bp, Artificial Sequence
  Synthetic Oligonucleotide
acggttttcagagtatccgaaactt

SEQ ID NO: 1173 - DNA, 25 bp, Artificial Sequence
  Synthetic Oligonucleotide
cactgtttcaagagattttatccgt

SEQ ID NO: 1174 - DNA, 25 bp, Artificial Sequence
  Synthetic Oligonucleotide
cttttggtgatgaagtgttaccggt

SEQ ID NO: 1175 - DNA, 25 bp, Artificial Sequence
  Synthetic Oligonucleotide
tctagtttggtcctttgttaagacc

SEQ ID NO: 1176 - DNA, 25 bp, Artificial Sequence
  Synthetic Oligonucleotide
tttgggtcgagtgcaagggataacc

SEQ ID NO: 1177 - DNA, 25 bp, Artificial Sequence
  Synthetic Oligonucleotide
cttgacgtgggcaaaaggctacctc

SEQ ID NO: 1178 - DNA, 25 bp, Artificial Sequence
  Synthetic Oligonucleotide
atcgtcgtaggcaaaaggggcccgt

SEQ ID NO: 1179 - DNA, 25 bp, Artificial Sequence
  Synthetic Oligonucleotide
tccaagagggactctgggggtccct

SEQ ID NO: 1180 - DNA, 25 bp, Artificial Sequence
  Synthetic Oligonucleotide
caataacggagtttgaaggcgccgg

SEQ ID NO: 1181 - DNA, 25 bp, Artificial Sequence
  Synthetic Oligonucleotide
gcagtcgtgatgtaagcgtaggacg

SEQ ID NO: 1182 - DNA, 25 bp, Artificial Sequence
  Synthetic Oligonucleotide
acgccggcagctcctaaaggtggga

SEQ ID NO: 1183 - DNA, 25 bp, Artificial Sequence
  Synthetic Oligonucleotide
gaccaccaggtccccagaatgagga

SEQ ID NO: 1184 - DNA, 25 bp, Artificial Sequence
  Synthetic Oligonucleotide
tacacccggtactccaggtggtggg

SEQ ID NO: 1185 - DNA, 25 bp, Artificial Sequence
  Synthetic Oligonucleotide
accagcaactcccgttacggtcggg

SEQ ID NO: 1186 - DNA, 25 bp, Artificial Sequence
  Synthetic Oligonucleotide
ccaggagcccgtcctacgcttacat

SEQ ID NO: 1187 - DNA, 25 bp, Artificial Sequence
  Synthetic Oligonucleotide
ggagccggagggtttcacgacccta

SEQ ID NO: 1188 - DNA, 25 bp, Artificial Sequence
  Synthetic Oligonucleotide
aaggagactccgaggaaattccata

SEQ ID NO: 1189 - DNA, 25 bp, Artificial Sequence
  Synthetic Oligonucleotide
aaataaacacggtgaatttccacgc

SEQ ID NO: 1190 - DNA, 25 bp, Artificial Sequence
  Synthetic Oligonucleotide
atgaactaagcgaaattcaccagct

SEQ ID NO: 1191 - DNA, 25 bp, Artificial Sequence
  Synthetic Oligonucleotide
acctagaaccggaattgcaacagct

SEQ ID NO: 1192 - DNA, 25 bp, Artificial Sequence
  Synthetic Oligonucleotide
gtacgaatcgggatctggaacaact

SEQ ID NO: 1193 - DNA, 25 bp, Artificial Sequence
  Synthetic Oligonucleotide
aggacttgccatcgtagaactgctg

SEQ ID NO: 1194 - DNA, 25 bp, Artificial Sequence
  Synthetic Oligonucleotide
cagcagttctacgatggcaagtcct

SEQ ID NO: 1195 - DNA, 25 bp, Artificial Sequence
  Synthetic Oligonucleotide
tgcaggcctctgcagtgatttatta

SEQ ID NO: 1196 - DNA, 25 bp, Artificial Sequence
  Synthetic Oligonucleotide
gggaatctacttgtgaagtccttta

SEQ ID NO: 1197 - DNA, 25 bp, Artificial Sequence
  Synthetic Oligonucleotide
gaggaggcgcttgtgcttcttgctc

SEQ ID NO: 1198 - DNA, 25 bp, Artificial Sequence
  Synthetic Oligonucleotide
gtaggggtccttacttccaaccttc

SEQ ID NO: 1199 - DNA, 25 bp, Artificial Sequence
  Synthetic Oligonucleotide
taggggtcctttgttccaaccttct

SEQ ID NO: 1200 - DNA, 25 bp, Artificial Sequence
  Synthetic Oligonucleotide
tggggtgctggtgtggtttaccttt

SEQ ID NO: 1201 - DNA, 25 bp, Artificial Sequence
  Synthetic Oligonucleotide
ggcaatagttataggtttcgtcgtt

SEQ ID NO: 1202 - DNA, 25 bp, Artificial Sequence
  Synthetic Oligonucleotide
acgagggagattctggaattccgta

SEQ ID NO: 1203 - DNA, 25 bp, Artificial Sequence
  Synthetic Oligonucleotide
acaaccgcatgtacaggaatgccta

SEQ ID NO: 1204 - DNA, 25 bp, Artificial Sequence
  Synthetic Oligonucleotide
accaaaacaagtatgtggtatggca

SEQ ID NO: 1205 - DNA, 25 bp, Artificial Sequence
  Synthetic Oligonucleotide
cagcagttctacgatggcaagtcct

SEQ ID NO: 1206 - DNA, 25 bp, Artificial Sequence
  Synthetic Oligonucleotide
aggacttgccatcgtagaactgctg

SEQ ID NO: 1207 - DNA, 25 bp, Artificial Sequence
  Synthetic Oligonucleotide
aggacttgccatcgtagaactgctg

SEQ ID NO: 1208 - DNA, 25 bp, Artificial Sequence
  Synthetic Oligonucleotide
cagcagttctacgatggcaagtcct

SEQ ID NO: 1209 - DNA, 25 bp, Artificial Sequence
  Synthetic Oligonucleotide
cagcagttctacgatggcaagtcct

SEQ ID NO: 1210 - DNA, 25 bp, Artificial Sequence
  Synthetic Oligonucleotide
cagcagttctacgatggcaagtcct

SEQ ID NO: 1211 - DNA, 25 bp, Artificial Sequence
  Synthetic Oligonucleotide
aggacttgccatcgtagaactgctg

SEQ ID NO: 1212 - DNA, 25 bp, Artificial Sequence
  Synthetic Oligonucleotide
aggacttgccatcgtagaactgctg

SEQ ID NO: 1213 - DNA, 25 bp, Artificial Sequence
  Synthetic Oligonucleotide
aggacttgccatcgtagaactgctg

SEQ ID NO: 1214 - DNA, 25 bp, Artificial Sequence
  Synthetic Oligonucleotide
cagcagttctacgatggcaagtcct

SEQ ID NO: 1215 - DNA, 25 bp, Artificial Sequence
  Synthetic Oligonucleotide
cagcagttctacgatggcaagtcct

SEQ ID NO: 1216 - DNA, 25 bp, Artificial Sequence
  Synthetic Oligonucleotide
cagcagttctacgatggcaagtcct

SEQ ID NO: 1217 - DNA, 25 bp, Artificial Sequence
  Synthetic Oligonucleotide
aggacttgccatcgtagaactgctg

SEQ ID NO: 1218 - DNA, 25 bp, Artificial Sequence
  Synthetic Oligonucleotide
aggacttgccatcgtagaactgctg

SEQ ID NO: 1219 - DNA, 25 bp, Artificial Sequence
  Synthetic Oligonucleotide
cagcagttctacgatggcaagtcct

SEQ ID NO: 1220 - DNA, 25 bp, Artificial Sequence
  Synthetic Oligonucleotide
cagcagttctacgatggcaagtcct

SEQ ID NO: 1221 - DNA, 25 bp, Artificial Sequence
  Synthetic Oligonucleotide
aggacttgccatcgtagaactgctg

SEQ ID NO: 1222 - DNA, 25 bp, Artificial Sequence
  Synthetic Oligonucleotide
aggacttgccatcgtagaactgctg

SEQ ID NO: 1223 - DNA, 25 bp, Artificial Sequence
  Synthetic Oligonucleotide
aggacttgccatcgtagaactgctg

SEQ ID NO: 1224 - DNA, 25 bp, Artificial Sequence
  Synthetic Oligonucleotide
cagcagttctacgatggcaagtcct

SEQ ID NO: 1225 - DNA, 25 bp, Artificial Sequence
  Synthetic Oligonucleotide
cagcagttctacgatggcaagtcct

SEQ ID NO: 1226 - DNA, 25 bp, Artificial Sequence
  Synthetic Oligonucleotide
aggacttgccatcgtagaactgctg

SEQ ID NO: 1227 - DNA, 25 bp, Artificial Sequence
  Synthetic Oligonucleotide
aggacttgccatcgtagaactgctg

SEQ ID NO: 1228 - DNA, 25 bp, Artificial Sequence
  Synthetic Oligonucleotide
aggacttgccatcgtagaactgctg

SEQ ID NO: 1229 - DNA, 25 bp, Artificial Sequence
  Synthetic Oligonucleotide
aggacttgccatcgtagaactgctg

SEQ ID NO: 1230 - DNA, 25 bp, Artificial Sequence
  Synthetic Oligonucleotide
cagcagttctacgatggcaagtcct

SEQ ID NO: 1231 - DNA, 25 bp, Artificial Sequence
  Synthetic Oligonucleotide
cagcagttctacgatggcaagtcct

SEQ ID NO: 1232 - DNA, 25 bp, Artificial Sequence
  Synthetic Oligonucleotide
aggacttgccatcgtagaactgctg

SEQ ID NO: 1233 - DNA, 25 bp, Artificial Sequence
  Synthetic Oligonucleotide
aggacttgccatcgtagaactgctg

SEQ ID NO: 1234 - DNA, 25 bp, Artificial Sequence
  Synthetic Oligonucleotide
cagcagttctacgatggcaagtcct

SEQ ID NO: 1235 - DNA, 25 bp, Artificial Sequence
  Synthetic Oligonucleotide
aggacttgccatcgtagaactgctg

SEQ ID NO: 1236 - DNA, 25 bp, Artificial Sequence
  Synthetic Oligonucleotide
aggacttgccatcgtagaactgctg

SEQ ID NO: 1237 - DNA, 25 bp, Artificial Sequence
  Synthetic Oligonucleotide
aggacttgccatcgtagaactgctg

SEQ ID NO: 1238 - DNA, 25 bp, Artificial Sequence
  Synthetic Oligonucleotide
aggacttgccatcgtagaactgctg

SEQ ID NO: 1239 - DNA, 25 bp, Artificial Sequence
  Synthetic Oligonucleotide
aggacttgccatcgtagaactgctg

SEQ ID NO: 1240 - DNA, 25 bp, Artificial Sequence
  Synthetic Oligonucleotide
cagcagttctacgatggcaagtcct

SEQ ID NO: 1241 - DNA, 25 bp, Artificial Sequence
  Synthetic Oligonucleotide
aggacttgccatcgtagaactgctg

SEQ ID NO: 1242 - DNA, 25 bp, Artificial Sequence
  Synthetic Oligonucleotide
aggacttgccatcgtagaactgctg

SEQ ID NO: 1243 - DNA, 25 bp, Artificial Sequence
  Synthetic Oligonucleotide
cagcagttctacgatggcaagtcct

SEQ ID NO: 1244 - DNA, 25 bp, Artificial Sequence
  Synthetic Oligonucleotide
aggacttgccatcgtagaactgctg

SEQ ID NO: 1245 - DNA, 25 bp, Artificial Sequence
  Synthetic Oligonucleotide
agcagaggctgcttgctcaggaaga

SEQ ID NO: 1246 - DNA, 25 bp, Artificial Sequence
  Synthetic Oligonucleotide
gcttaggcaacttaggctaggatta

SEQ ID NO: 1247 - DNA, 25 bp, Artificial Sequence
  Synthetic Oligonucleotide
ccaagaggtttttcaggtgtgctta

SEQ ID NO: 1248 - DNA, 25 bp, Artificial Sequence
  Synthetic Oligonucleotide
ccaatgtcatttctgatgagtcttt

SEQ ID NO: 1249 - DNA, 25 bp, Artificial Sequence
  Synthetic Oligonucleotide
aggacttgccatcgtagaactgctg

SEQ ID NO: 1250 - DNA, 25 bp, Artificial Sequence
  Synthetic Oligonucleotide
aggacttgccatcgtagaactgctg

SEQ ID NO: 1251 - DNA, 25 bp, Artificial Sequence
  Synthetic Oligonucleotide
cagcagttctacgatggcaagtcct

SEQ ID NO: 1252 - DNA, 25 bp, Artificial Sequence
  Synthetic Oligonucleotide
aggacttgccatcgtagaactgctg

SEQ ID NO: 1253 - DNA, 25 bp, Artificial Sequence
  Synthetic Oligonucleotide
aggacttgccatcgtagaactgctg

SEQ ID NO: 1254 - DNA, 25 bp, Artificial Sequence
  Synthetic Oligonucleotide
cagcagttctacgatggcaagtcct

SEQ ID NO: 1255 - DNA, 25 bp, Artificial Sequence
  Synthetic Oligonucleotide
cagcagttctacgatggcaagtcct

SEQ ID NO: 1256 - DNA, 25 bp, Artificial Sequence
  Synthetic Oligonucleotide
cagcagttctacgatggcaagtcct

SEQ ID NO: 1257 - DNA, 25 bp, Artificial Sequence
  Synthetic Oligonucleotide
aggacttgccatcgtagaactgctg

SEQ ID NO: 1258 - DNA, 25 bp, Artificial Sequence
  Synthetic Oligonucleotide
aggacttgccatcgtagaactgctg

SEQ ID NO: 1259 - DNA, 25 bp, Artificial Sequence
  Synthetic Oligonucleotide
aggacttgccatcgtagaactgctg

SEQ ID NO: 1260 - DNA, 25 bp, Artificial Sequence
  Synthetic Oligonucleotide
cagcagttctacgatggcaagtcct

SEQ ID NO: 1261 - DNA, 25 bp, Artificial Sequence
  Synthetic Oligonucleotide
cagcagttctacgatggcaagtcct

SEQ ID NO: 1262 - DNA, 25 bp, Artificial Sequence
  Synthetic Oligonucleotide
cagcagttctacgatggcaagtcct

SEQ ID NO: 1263 - DNA, 25 bp, Artificial Sequence
  Synthetic Oligonucleotide
aggacttgccatcgtagaactgctg

SEQ ID NO: 1264 - DNA, 25 bp, Artificial Sequence
  Synthetic Oligonucleotide
aggacttgccatcgtagaactgctg

SEQ ID NO: 1265 - DNA, 25 bp, Artificial Sequence
  Synthetic Oligonucleotide
aggacttgccatcgtagaactgctg

SEQ ID NO: 1266 - DNA, 25 bp, Artificial Sequence
  Synthetic Oligonucleotide
cagcagttctacgatggcaagtcct

SEQ ID NO: 1267 - DNA, 25 bp, Artificial Sequence
  Synthetic Oligonucleotide
aggacttgccatcgtagaactgctg

SEQ ID NO: 1268 - DNA, 25 bp, Artificial Sequence
  Synthetic Oligonucleotide
aggacttgccatcgtagaactgctg

SEQ ID NO: 1269 - DNA, 25 bp, Artificial Sequence
  Synthetic Oligonucleotide
aggacttgccatcgtagaactgctg

SEQ ID NO: 1270 - DNA, 25 bp, Artificial Sequence
  Synthetic Oligonucleotide
cagcagttctacgatggcaagtcct

SEQ ID NO: 1271 - DNA, 25 bp, Artificial Sequence
  Synthetic Oligonucleotide
cagcagttctacgatggcaagtcct

SEQ ID NO: 1272 - DNA, 25 bp, Artificial Sequence
  Synthetic Oligonucleotide
aggacttgccatcgtagaactgctg

SEQ ID NO: 1273 - DNA, 25 bp, Artificial Sequence
  Synthetic Oligonucleotide
aggacttgccatcgtagaactgctg

SEQ ID NO: 1274 - DNA, 25 bp, Artificial Sequence
  Synthetic Oligonucleotide
aggtggttgattgttgccggtacgt

SEQ ID NO: 1275 - DNA, 25 bp, Artificial Sequence
  Synthetic Oligonucleotide
aggtggttgattgttgccggtacgt

SEQ ID NO: 1276 - DNA, 25 bp, Artificial Sequence
  Synthetic Oligonucleotide
aaatgtgtatggacttggcaatagt

SEQ ID NO: 1277 - DNA, 25 bp, Artificial Sequence
  Synthetic Oligonucleotide
aaaaggtcggctgtgggtcgaagta

SEQ ID NO: 1278 - DNA, 25 bp, Artificial Sequence
  Synthetic Oligonucleotide
gaaagggtttccagggagtaagagc

SEQ ID NO: 1279 - DNA, 25 bp, Artificial Sequence
  Synthetic Oligonucleotide
ttgctcttcgaccactggtaggagc

SEQ ID NO: 1280 - DNA, 25 bp, Artificial Sequence
  Synthetic Oligonucleotide
ccttttctcggactcccgtagcctt

SEQ ID NO: 1281 - DNA, 25 bp, Artificial Sequence
  Synthetic Oligonucleotide
acggttttcagactatccgaaactt

SEQ ID NO: 1282 - DNA, 25 bp, Artificial Sequence
  Synthetic Oligonucleotide
cactgtttcaagtgattttatccgt

SEQ ID NO: 1283 - DNA, 25 bp, Artificial Sequence
  Synthetic Oligonucleotide
cttttggtgatgtagtgttaccggt

SEQ ID NO: 1284 - DNA, 25 bp, Artificial Sequence
  Synthetic Oligonucleotide
tctagtttggtcgtttgttaagacc

SEQ ID NO: 1285 - DNA, 25 bp, Artificial Sequence
  Synthetic Oligonucleotide
tttgggtcgagtccaagggataacc

SEQ ID NO: 1286 - DNA, 25 bp, Artificial Sequence
  Synthetic Oligonucleotide
cttgacgtgggctaaaggctacctc

SEQ ID NO: 1287 - DNA, 25 bp, Artificial Sequence
  Synthetic Oligonucleotide
atcgtcgtaggctaaaggggcccgt

SEQ ID NO: 1288 - DNA, 25 bp, Artificial Sequence
  Synthetic Oligonucleotide
tccaagagggacactgggggtccct

SEQ ID NO: 1289 - DNA, 25 bp, Artificial Sequence
  Synthetic Oligonucleotide
caataacggagtatgaaggcgccgg

SEQ ID NO: 1290 - DNA, 25 bp, Artificial Sequence
  Synthetic Oligonucleotide
gcagtcgtgatgaaagcgtaggacg

SEQ ID NO: 1291 - DNA, 25 bp, Artificial Sequence
  Synthetic Oligonucleotide
acgccggcagctgctaaaggtggga

SEQ ID NO: 1292 - DNA, 25 bp, Artificial Sequence
  Synthetic Oligonucleotide
gaccaccaggtcgccagaatgagga

SEQ ID NO: 1293 - DNA, 25 bp, Artificial Sequence
  Synthetic Oligonucleotide
tacacccggtacaccaggtggtggg

SEQ ID NO: 1294 - DNA, 25 bp, Artificial Sequence
  Synthetic Oligonucleotide
accagcaactccggttacggtcggg

SEQ ID NO: 1295 - DNA, 25 bp, Artificial Sequence
  Synthetic Oligonucleotide
ccaggagcccgtgctacgcttacat

SEQ ID NO: 1296 - DNA, 25 bp, Artificial Sequence
  Synthetic Oligonucleotide
ggagccggagggattcacgacccta

SEQ ID NO: 1297 - DNA, 25 bp, Artificial Sequence
  Synthetic Oligonucleotide
aaggagactccgtggaaattccata

SEQ ID NO: 1298 - DNA, 25 bp, Artificial Sequence
  Synthetic Oligonucleotide
aaataaacacggagaatttccacgc

SEQ ID NO: 1299 - DNA, 25 bp, Artificial Sequence
  Synthetic Oligonucleotide
atgaactaagcgtaattcaccagct

SEQ ID NO: 1300 - DNA, 25 bp, Artificial Sequence
  Synthetic Oligonucleotide
acctagaaccggtattgcaacagct

SEQ ID NO: 1301 - DNA, 25 bp, Artificial Sequence
  Synthetic Oligonucleotide
gtacgaatcgggttctggaacaact

SEQ ID NO: 1302 - DNA, 25 bp, Artificial Sequence
  Synthetic Oligonucleotide
cagcagttctacgatggcaagtcct

SEQ ID NO: 1303 - DNA, 25 bp, Artificial Sequence
  Synthetic Oligonucleotide
aggacttgccatcgtagaactgctg

SEQ ID NO: 1304 - DNA, 25 bp, Artificial Sequence
  Synthetic Oligonucleotide
accacccatgtcctcgaggtggaac

SEQ ID NO: 1305 - DNA, 25 bp, Artificial Sequence
  Synthetic Oligonucleotide
cgcctgtcatagtcgcctagggcta

SEQ ID NO: 1306 - DNA, 25 bp, Artificial Sequence
  Synthetic Oligonucleotide
atccgatattatagccgcctttgaa

SEQ ID NO: 1307 - DNA, 25 bp, Artificial Sequence
  Synthetic Oligonucleotide
gtctttttatggtgacttatcacaa

SEQ ID NO: 1308 - DNA, 25 bp, Artificial Sequence
  Synthetic Oligonucleotide
ggttattatctgagcgtttaaccaa

SEQ ID NO: 1309 - DNA, 25 bp, Artificial Sequence
  Synthetic Oligonucleotide
ttgtcttttggacgttgtttaccaa

SEQ ID NO: 1310 - DNA, 25 bp, Artificial Sequence
  Synthetic Oligonucleotide
gttcatattctgttatggttttttt

SEQ ID NO: 1311 - DNA, 25 bp, Artificial Sequence
  Synthetic Oligonucleotide
ctcaagtattgggtaggtttcctta

SEQ ID NO: 1312 - DNA, 25 bp, Artificial Sequence
  Synthetic Oligonucleotide
aaaaaccgagagattatgcgtacta

SEQ ID NO: 1313 - DNA, 25 bp, Artificial Sequence
  Synthetic Oligonucleotide
tggaaaaaaggactaaagtccctac

SEQ ID NO: 1314 - DNA, 25 bp, Artificial Sequence
  Synthetic Oligonucleotide
cagcagttctacgatggcaagtcct

SEQ ID NO: 1315 - DNA, 25 bp, Artificial Sequence
  Synthetic Oligonucleotide
aggacttgccatcgtagaactgctg

SEQ ID NO: 1316 - DNA, 25 bp, Artificial Sequence
  Synthetic Oligonucleotide
aggacttgccatcgtagaactgctg

SEQ ID NO: 1317 - DNA, 25 bp, Artificial Sequence
  Synthetic Oligonucleotide
aggacttgccatcgtagaactgctg

SEQ ID NO: 1318 - DNA, 25 bp, Artificial Sequence
  Synthetic Oligonucleotide
cagcagttctacgatggcaagtcct

SEQ ID NO: 1319 - DNA, 25 bp, Artificial Sequence
  Synthetic Oligonucleotide
cagcagttctacgatggcaagtcct

SEQ ID NO: 1320 - DNA, 25 bp, Artificial Sequence
  Synthetic Oligonucleotide
cagcagttctacgatggcaagtcct

SEQ ID NO: 1321 - DNA, 25 bp, Artificial Sequence
  Synthetic Oligonucleotide
cagcagttctacgatggcaagtcct

SEQ ID NO: 1322 - DNA, 25 bp, Artificial Sequence
  Synthetic Oligonucleotide
cagcagttctacgatggcaagtcct

SEQ ID NO: 1323 - DNA, 25 bp, Artificial Sequence
  Synthetic Oligonucleotide
aggacttgccatcgtagaactgctg

SEQ ID NO: 1324 - DNA, 25 bp, Artificial Sequence
  Synthetic Oligonucleotide
cagcagttctacgatggcaagtcct

SEQ ID NO: 1325 - DNA, 25 bp, Artificial Sequence
  Synthetic Oligonucleotide
aggacttgccatcgtagaactgctg

SEQ ID NO: 1326 - DNA, 25 bp, Artificial Sequence
  Synthetic Oligonucleotide
aggacttgccatcgtagaactgctg

SEQ ID NO: 1327 - DNA, 25 bp, Artificial Sequence
  Synthetic Oligonucleotide
aggacttgccatcgtagaactgctg

SEQ ID NO: 1328 - DNA, 25 bp, Artificial Sequence
  Synthetic Oligonucleotide
cagcagttctacgatggcaagtcct

SEQ ID NO: 1329 - DNA, 25 bp, Artificial Sequence
  Synthetic Oligonucleotide
cagcagttctacgatggcaagtcct

SEQ ID NO: 1330 - DNA, 25 bp, Artificial Sequence
  Synthetic Oligonucleotide
cagcagttctacgatggcaagtcct

SEQ ID NO: 1331 - DNA, 25 bp, Artificial Sequence
  Synthetic Oligonucleotide
cagcagttctacgatggcaagtcct

SEQ ID NO: 1332 - DNA, 25 bp, Artificial Sequence
  Synthetic Oligonucleotide
cagcagttctacgatggcaagtcct

SEQ ID NO: 1333 - DNA, 25 bp, Artificial Sequence
  Synthetic Oligonucleotide
aggacttgccatcgtagaactgctg

SEQ ID NO: 1334 - DNA, 25 bp, Artificial Sequence
  Synthetic Oligonucleotide
cagcagttctacgatggcaagtcct

SEQ ID NO: 1335 - DNA, 25 bp, Artificial Sequence
  Synthetic Oligonucleotide
aggacttgccatcgtagaactgctg

SEQ ID NO: 1336 - DNA, 25 bp, Artificial Sequence
  Synthetic Oligonucleotide
aggacttgccatcgtagaactgctg

SEQ ID NO: 1337 - DNA, 25 bp, Artificial Sequence
  Synthetic Oligonucleotide
aggacttgccatcgtagaactgctg

SEQ ID NO: 1338 - DNA, 25 bp, Artificial Sequence
  Synthetic Oligonucleotide
aggacttgccatcgtagaactgctg

SEQ ID NO: 1339 - DNA, 25 bp, Artificial Sequence
  Synthetic Oligonucleotide
cagcagttctacgatggcaagtcct

SEQ ID NO: 1340 - DNA, 25 bp, Artificial Sequence
  Synthetic Oligonucleotide
aggacttgccatcgtagaactgctg

SEQ ID NO: 1341 - DNA, 25 bp, Artificial Sequence
  Synthetic Oligonucleotide
aggacttgccatcgtagaactgctg

SEQ ID NO: 1342 - DNA, 25 bp, Artificial Sequence
  Synthetic Oligonucleotide
aggacttgccatcgtagaactgctg

SEQ ID NO: 1343 - DNA, 25 bp, Artificial Sequence
  Synthetic Oligonucleotide
cagcagttctacgatggcaagtcct

SEQ ID NO: 1344 - DNA, 25 bp, Artificial Sequence
  Synthetic Oligonucleotide
aggacttgccatcgtagaactgctg

SEQ ID NO: 1345 - DNA, 25 bp, Artificial Sequence
  Synthetic Oligonucleotide
aggacttgccatcgtagaactgctg

SEQ ID NO: 1346 - DNA, 25 bp, Artificial Sequence
  Synthetic Oligonucleotide
cagcagttctacgatggcaagtcct

SEQ ID NO: 1347 - DNA, 25 bp, Artificial Sequence
  Synthetic Oligonucleotide
aggacttgccatcgtagaactgctg

SEQ ID NO: 1348 - DNA, 25 bp, Artificial Sequence
  Synthetic Oligonucleotide
aggacttgccatcgtagaactgctg

SEQ ID NO: 1349 - DNA, 25 bp, Artificial Sequence
  Synthetic Oligonucleotide
cagcagttctacgatggcaagtcct

SEQ ID NO: 1350 - DNA, 25 bp, Artificial Sequence
  Synthetic Oligonucleotide
cagcagttctacgatggcaagtcct

SEQ ID NO: 1351 - DNA, 25 bp, Artificial Sequence
  Synthetic Oligonucleotide
cagcagttctacgatggcaagtcct

SEQ ID NO: 1352 - DNA, 25 bp, Artificial Sequence
  Synthetic Oligonucleotide
aggacttgccatcgtagaactgctg

SEQ ID NO: 1353 - DNA, 25 bp, Artificial Sequence
  Synthetic Oligonucleotide
aggacttgccatcgtagaactgctg

SEQ ID NO: 1354 - DNA, 25 bp, Artificial Sequence
  Synthetic Oligonucleotide
gcttcggcaactaaggctagaatta

SEQ ID NO: 1355 - DNA, 25 bp, Artificial Sequence
  Synthetic Oligonucleotide
gctttggcaactaaggctagaatta

SEQ ID NO: 1356 - DNA, 25 bp, Artificial Sequence
  Synthetic Oligonucleotide
tatcgggttcatcggttagtattta

SEQ ID NO: 1357 - DNA, 25 bp, Artificial Sequence
  Synthetic Oligonucleotide
catcagtttcttcggttctatcttg

SEQ ID NO: 1358 - DNA, 25 bp, Artificial Sequence
  Synthetic Oligonucleotide
aggacttgccatcgtagaactgctg

SEQ ID NO: 1359 - DNA, 25 bp, Artificial Sequence
  Synthetic Oligonucleotide
aggacttgccatcgtagaactgctg

SEQ ID NO: 1360 - DNA, 25 bp, Artificial Sequence
  Synthetic Oligonucleotide
cagcagttctacgatggcaagtcct

SEQ ID NO: 1361 - DNA, 25 bp, Artificial Sequence
  Synthetic Oligonucleotide
aggacttgccatcgtagaactgctg

SEQ ID NO: 1362 - DNA, 25 bp, Artificial Sequence
  Synthetic Oligonucleotide
aggacttgccatcgtagaactgctg

SEQ ID NO: 1363 - DNA, 25 bp, Artificial Sequence
  Synthetic Oligonucleotide
cagcagttctacgatggcaagtcct

SEQ ID NO: 1364 - DNA, 25 bp, Artificial Sequence
  Synthetic Oligonucleotide
aggacttgccatcgtagaactgctg

SEQ ID NO: 1365 - DNA, 25 bp, Artificial Sequence
  Synthetic Oligonucleotide
aggacttgccatcgtagaactgctg

SEQ ID NO: 1366 - DNA, 25 bp, Artificial Sequence
  Synthetic Oligonucleotide
aggacttgccatcgtagaactgctg

SEQ ID NO: 1367 - DNA, 25 bp, Artificial Sequence
  Synthetic Oligonucleotide
aggacttgccatcgtagaactgctg

SEQ ID NO: 1368 - DNA, 25 bp, Artificial Sequence
  Synthetic Oligonucleotide
aggacttgccatcgtagaactgctg

SEQ ID NO: 1369 - DNA, 25 bp, Artificial Sequence
  Synthetic Oligonucleotide
aggacttgccatcgtagaactgctg

SEQ ID NO: 1370 - DNA, 25 bp, Artificial Sequence
  Synthetic Oligonucleotide
aggacttgccatcgtagaactgctg

SEQ ID NO: 1371 - DNA, 25 bp, Artificial Sequence
  Synthetic Oligonucleotide
aggacttgccatcgtagaactgctg

SEQ ID NO: 1372 - DNA, 25 bp, Artificial Sequence
  Synthetic Oligonucleotide
cagcagttctacgatggcaagtcct

SEQ ID NO: 1373 - DNA, 25 bp, Artificial Sequence
  Synthetic Oligonucleotide
aggacttgccatcgtagaactgctg

SEQ ID NO: 1374 - DNA, 25 bp, Artificial Sequence
  Synthetic Oligonucleotide
aggacttgccatcgtagaactgctg

SEQ ID NO: 1375 - DNA, 25 bp, Artificial Sequence
  Synthetic Oligonucleotide
cagcagttctacgatggcaagtcct

SEQ ID NO: 1376 - DNA, 25 bp, Artificial Sequence
  Synthetic Oligonucleotide
aggacttgccatcgtagaactgctg

SEQ ID NO: 1377 - DNA, 25 bp, Artificial Sequence
  Synthetic Oligonucleotide
aggacttgccatcgtagaactgctg

SEQ ID NO: 1378 - DNA, 25 bp, Artificial Sequence
  Synthetic Oligonucleotide
aggacttgccatcgtagaactgctg

SEQ ID NO: 1379 - DNA, 25 bp, Artificial Sequence
  Synthetic Oligonucleotide
aggacttgccatcgtagaactgctg

SEQ ID NO: 1380 - DNA, 25 bp, Artificial Sequence
  Synthetic Oligonucleotide
aggacttgccatcgtagaactgctg

SEQ ID NO: 1381 - DNA, 25 bp, Artificial Sequence
  Synthetic Oligonucleotide
cagcagttctacgatggcaagtcct

SEQ ID NO: 1382 - DNA, 25 bp, Artificial Sequence
  Synthetic Oligonucleotide
aggacttgccatcgtagaactgctg

SEQ ID NO: 1383 - DNA, 25 bp, Artificial Sequence
  Synthetic Oligonucleotide
acagaattatgcttaccctggcgaa

SEQ ID NO: 1384 - DNA, 25 bp, Artificial Sequence
  Synthetic Oligonucleotide
cctagggctaagaggtcgctggcaa

SEQ ID NO: 1385 - DNA, 25 bp, Artificial Sequence
  Synthetic Oligonucleotide
catatggttccgaggcatggcatag

SEQ ID NO: 1386 - DNA, 25 bp, Artificial Sequence
  Synthetic Oligonucleotide
gacatggccggcacgcatgaatctg

SEQ ID NO: 1387 - DNA, 25 bp, Artificial Sequence
  Synthetic Oligonucleotide
tatggcagtgtcacacttgaaaggt

SEQ ID NO: 1388 - DNA, 25 bp, Artificial Sequence
  Synthetic Oligonucleotide
aacgtggtcattcttgttagaaagg

SEQ ID NO: 1389 - DNA, 25 bp, Artificial Sequence
  Synthetic Oligonucleotide
tatccggccaacttttgaaacaggt

SEQ ID NO: 1390 - DNA, 25 bp, Artificial Sequence
  Synthetic Oligonucleotide
atcccgaaaacacgagtcaattacc

SEQ ID NO: 1391 - DNA, 25 bp, Artificial Sequence
  Synthetic Oligonucleotide
tacctaaaagtccgggttaaaaact

SEQ ID NO: 1392 - DNA, 25 bp, Artificial Sequence
  Synthetic Oligonucleotide
aatcttgaatcacggttacattaat

SEQ ID NO: 1393 - DNA, 25 bp, Artificial Sequence
  Synthetic Oligonucleotide
gtccatttatcatgtgttactttgc

SEQ ID NO: 1394 - DNA, 25 bp, Artificial Sequence
  Synthetic Oligonucleotide
gttctatcttggtggttaggtctgc

SEQ ID NO: 1395 - DNA, 25 bp, Artificial Sequence
  Synthetic Oligonucleotide
ccctgttgtttgtggtaaggtccga

SEQ ID NO: 1396 - DNA, 25 bp, Artificial Sequence
  Synthetic Oligonucleotide
ggtagtgcggtgtcgaaaggtctcc

SEQ ID NO: 1397 - DNA, 25 bp, Artificial Sequence
  Synthetic Oligonucleotide
acgcgagttgaaatacaaattccgc

SEQ ID NO: 1398 - DNA, 25 bp, Artificial Sequence
  Synthetic Oligonucleotide
ttcaacgatggagaaccattccccg

SEQ ID NO: 1399 - DNA, 25 bp, Artificial Sequence
  Synthetic Oligonucleotide
ccgcagtcggtagaagatggccgcc

SEQ ID NO: 1400 - DNA, 25 bp, Artificial Sequence
  Synthetic Oligonucleotide
gcagacgtttcctaagtcgggcggc

SEQ ID NO: 1401 - DNA, 25 bp, Artificial Sequence
  Synthetic Oligonucleotide
tgccaccttccgtcttgggaacatt

SEQ ID NO: 1402 - DNA, 25 bp, Artificial Sequence
  Synthetic Oligonucleotide
acctcagtccctgtcttggggtttg

SEQ ID NO: 1403 - DNA, 25 bp, Artificial Sequence
  Synthetic Oligonucleotide
ttgaaacccgtgagtcggagatgtg

SEQ ID NO: 1404 - DNA, 25 bp, Artificial Sequence
  Synthetic Oligonucleotide
tgccagtccccgagacgacggattt

SEQ ID NO: 1405 - DNA, 25 bp, Artificial Sequence
  Synthetic Oligonucleotide
atcgcccagggcatgaacggctgct

SEQ ID NO: 1406 - DNA, 25 bp, Artificial Sequence
  Synthetic Oligonucleotide
gaggtacagcagggtcaaccactgc

SEQ ID NO: 1407 - DNA, 25 bp, Artificial Sequence
  Synthetic Oligonucleotide
gtggagccggagggtttcacgaccc

SEQ ID NO: 1408 - DNA, 25 bp, Artificial Sequence
  Synthetic Oligonucleotide
gtcctccagtacttttgcctaccac

SEQ ID NO: 1409 - DNA, 25 bp, Artificial Sequence
  Synthetic Oligonucleotide
ctaagtagacgttttcgtctcctga

SEQ ID NO: 1410 - DNA, 25 bp, Artificial Sequence
  Synthetic Oligonucleotide
tcaatagatagttatgcacctacta

SEQ ID NO: 1411 - DNA, 25 bp, Artificial Sequence
  Synthetic Oligonucleotide
aggacttgccatcgtagaactgctg

SEQ ID NO: 1412 - DNA, 25 bp, Artificial Sequence
  Synthetic Oligonucleotide
cagcagttctacgatggcaagtcct

SEQ ID NO: 1413 - DNA, 25 bp, Artificial Sequence
  Synthetic Oligonucleotide
accacccatgtcgtcgaggtggaac

SEQ ID NO: 1414 - DNA, 25 bp, Artificial Sequence
  Synthetic Oligonucleotide
cgcctgtcatagacgcctagggcta

SEQ ID NO: 1415 - DNA, 25 bp, Artificial Sequence
  Synthetic Oligonucleotide
atccgatattattgccgcctttgaa

SEQ ID NO: 1416 - DNA, 25 bp, Artificial Sequence
  Synthetic Oligonucleotide
gtctttttatggagacttatcacaa

SEQ ID NO: 1417 - DNA, 25 bp, Artificial Sequence
  Synthetic Oligonucleotide
ggttattatctgtgcgtttaaccaa

SEQ ID NO: 1418 - DNA, 25 bp, Artificial Sequence
  Synthetic Oligonucleotide
ttgtcttttggaggttgtttaccaa

SEQ ID NO: 1419 - DNA, 25 bp, Artificial Sequence
  Synthetic Oligonucleotide
gttcatattctgatatggttttttt

SEQ ID NO: 1420 - DNA, 25 bp, Artificial Sequence
  Synthetic Oligonucleotide
ctcaagtattggctaggtttcctta

SEQ ID NO: 1421 - DNA, 25 bp, Artificial Sequence
  Synthetic Oligonucleotide
aaaaaccgagagtttatgcgtacta

SEQ ID NO: 1422 - DNA, 25 bp, Artificial Sequence
  Synthetic Oligonucleotide
tggaaaaaaggagtaaagtccctac

SEQ ID NO: 1423 - DNA, 25 bp, Artificial Sequence
  Synthetic Oligonucleotide
cagcagttctacgatggcaagtcct

SEQ ID NO: 1424 - DNA, 25 bp, Artificial Sequence
  Synthetic Oligonucleotide
aggacttgccatcgtagaactgctg

SEQ ID NO: 1425 - DNA, 25 bp, Artificial Sequence
  Synthetic Oligonucleotide
aggacttgccatcgtagaactgctg

SEQ ID NO: 1426 - DNA, 25 bp, Artificial Sequence
  Synthetic Oligonucleotide
aggacttgccatcgtagaactgctg

SEQ ID NO: 1427 - DNA, 25 bp, Artificial Sequence
  Synthetic Oligonucleotide
cagcagttctacgatggcaagtcct

SEQ ID NO: 1428 - DNA, 25 bp, Artificial Sequence
  Synthetic Oligonucleotide
cagcagttctacgatggcaagtcct

SEQ ID NO: 1429 - DNA, 25 bp, Artificial Sequence
  Synthetic Oligonucleotide
aggacttgccatcgtagaactgctg

SEQ ID NO: 1430 - DNA, 25 bp, Artificial Sequence
  Synthetic Oligonucleotide
aggacttgccatcgtagaactgctg

SEQ ID NO: 1431 - DNA, 25 bp, Artificial Sequence
  Synthetic Oligonucleotide
aggacttgccatcgtagaactgctg

SEQ ID NO: 1432 - DNA, 25 bp, Artificial Sequence
  Synthetic Oligonucleotide
aggacttgccatcgtagaactgctg

SEQ ID NO: 1433 - DNA, 25 bp, Artificial Sequence
  Synthetic Oligonucleotide
cagcagttctacgatggcaagtcct

SEQ ID NO: 1434 - DNA, 25 bp, Artificial Sequence
  Synthetic Oligonucleotide
aggacttgccatcgtagaactgctg

SEQ ID NO: 1435 - DNA, 25 bp, Artificial Sequence
  Synthetic Oligonucleotide
aggacttgccatcgtagaactgctg

SEQ ID NO: 1436 - DNA, 25 bp, Artificial Sequence
  Synthetic Oligonucleotide
aggacttgccatcgtagaactgctg

SEQ ID NO: 1437 - DNA, 25 bp, Artificial Sequence
  Synthetic Oligonucleotide
cagcagttctacgatggcaagtcct

SEQ ID NO: 1438 - DNA, 25 bp, Artificial Sequence
  Synthetic Oligonucleotide
cagcagttctacgatggcaagtcct

SEQ ID NO: 1439 - DNA, 25 bp, Artificial Sequence
  Synthetic Oligonucleotide
aggacttgccatcgtagaactgctg

SEQ ID NO: 1440 - DNA, 25 bp, Artificial Sequence
  Synthetic Oligonucleotide
aggacttgccatcgtagaactgctg

SEQ ID NO: 1441 - DNA, 25 bp, Artificial Sequence
  Synthetic Oligonucleotide
aggacttgccatcgtagaactgctg

SEQ ID NO: 1442 - DNA, 25 bp, Artificial Sequence
  Synthetic Oligonucleotide
aggacttgccatcgtagaactgctg

SEQ ID NO: 1443 - DNA, 25 bp, Artificial Sequence
  Synthetic Oligonucleotide
cagcagttctacgatggcaagtcct

SEQ ID NO: 1444 - DNA, 25 bp, Artificial Sequence
  Synthetic Oligonucleotide
aggacttgccatcgtagaactgctg

SEQ ID NO: 1445 - DNA, 25 bp, Artificial Sequence
  Synthetic Oligonucleotide
aggacttgccatcgtagaactgctg

SEQ ID NO: 1446 - DNA, 25 bp, Artificial Sequence
  Synthetic Oligonucleotide
aggacttgccatcgtagaactgctg

SEQ ID NO: 1447 - DNA, 25 bp, Artificial Sequence
  Synthetic Oligonucleotide
cagcagttctacgatggcaagtcct

SEQ ID NO: 1448 - DNA, 25 bp, Artificial Sequence
  Synthetic Oligonucleotide
cagcagttctacgatggcaagtcct

SEQ ID NO: 1449 - DNA, 25 bp, Artificial Sequence
  Synthetic Oligonucleotide
aggacttgccatcgtagaactgctg

SEQ ID NO: 1450 - DNA, 25 bp, Artificial Sequence
  Synthetic Oligonucleotide
aggacttgccatcgtagaactgctg

SEQ ID NO: 1451 - DNA, 25 bp, Artificial Sequence
  Synthetic Oligonucleotide
aggacttgccatcgtagaactgctg

SEQ ID NO: 1452 - DNA, 25 bp, Artificial Sequence
  Synthetic Oligonucleotide
cagcagttctacgatggcaagtcct

SEQ ID NO: 1453 - DNA, 25 bp, Artificial Sequence
  Synthetic Oligonucleotide
aggacttgccatcgtagaactgctg

SEQ ID NO: 1454 - DNA, 25 bp, Artificial Sequence
  Synthetic Oligonucleotide
aggacttgccatcgtagaactgctg

SEQ ID NO: 1455 - DNA, 25 bp, Artificial Sequence
  Synthetic Oligonucleotide
cagcagttctacgatggcaagtcct

SEQ ID NO: 1456 - DNA, 25 bp, Artificial Sequence
  Synthetic Oligonucleotide
aggacttgccatcgtagaactgctg

SEQ ID NO: 1457 - DNA, 25 bp, Artificial Sequence
  Synthetic Oligonucleotide
aggacttgccatcgtagaactgctg

SEQ ID NO: 1458 - DNA, 25 bp, Artificial Sequence
  Synthetic Oligonucleotide
cagcagttctacgatggcaagtcct

SEQ ID NO: 1459 - DNA, 25 bp, Artificial Sequence
  Synthetic Oligonucleotide
aggacttgccatcgtagaactgctg

SEQ ID NO: 1460 - DNA, 25 bp, Artificial Sequence
  Synthetic Oligonucleotide
aggacttgccatcgtagaactgctg

SEQ ID NO: 1461 - DNA, 25 bp, Artificial Sequence
  Synthetic Oligonucleotide
aggacttgccatcgtagaactgctg

SEQ ID NO: 1462 - DNA, 25 bp, Artificial Sequence
  Synthetic Oligonucleotide
aggacttgccatcgtagaactgctg

SEQ ID NO: 1463 - DNA, 25 bp, Artificial Sequence
  Synthetic Oligonucleotide
gcttcggcaacttaggctagaatta

SEQ ID NO: 1464 - DNA, 25 bp, Artificial Sequence
  Synthetic Oligonucleotide
gctttggcaacttaggctagaatta

SEQ ID NO: 1465 - DNA, 25 bp, Artificial Sequence
  Synthetic Oligonucleotide
tatcgggttcatgggttagtattta

SEQ ID NO: 1466 - DNA, 25 bp, Artificial Sequence
  Synthetic Oligonucleotide
catcagtttcttgggttctatcttg

SEQ ID NO: 1467 - DNA, 25 bp, Artificial Sequence
  Synthetic Oligonucleotide
aggacttgccatcgtagaactgctg

SEQ ID NO: 1468 - DNA, 25 bp, Artificial Sequence
  Synthetic Oligonucleotide
aggacttgccatcgtagaactgctg

SEQ ID NO: 1469 - DNA, 25 bp, Artificial Sequence
  Synthetic Oligonucleotide
cagcagttctacgatggcaagtcct

SEQ ID NO: 1470 - DNA, 25 bp, Artificial Sequence
  Synthetic Oligonucleotide
aggacttgccatcgtagaactgctg

SEQ ID NO: 1471 - DNA, 25 bp, Artificial Sequence
  Synthetic Oligonucleotide
aggacttgccatcgtagaactgctg

SEQ ID NO: 1472 - DNA, 25 bp, Artificial Sequence
  Synthetic Oligonucleotide
cagcagttctacgatggcaagtcct

SEQ ID NO: 1473 - DNA, 25 bp, Artificial Sequence
  Synthetic Oligonucleotide
aggacttgccatcgtagaactgctg

SEQ ID NO: 1474 - DNA, 25 bp, Artificial Sequence
  Synthetic Oligonucleotide
aggacttgccatcgtagaactgctg

SEQ ID NO: 1475 - DNA, 25 bp, Artificial Sequence
  Synthetic Oligonucleotide
aggacttgccatcgtagaactgctg

SEQ ID NO: 1476 - DNA, 25 bp, Artificial Sequence
  Synthetic Oligonucleotide
aggacttgccatcgtagaactgctg

SEQ ID NO: 1477 - DNA, 25 bp, Artificial Sequence
  Synthetic Oligonucleotide
aggacttgccatcgtagaactgctg

SEQ ID NO: 1478 - DNA, 25 bp, Artificial Sequence
  Synthetic Oligonucleotide
aggacttgccatcgtagaactgctg

SEQ ID NO: 1479 - DNA, 25 bp, Artificial Sequence
  Synthetic Oligonucleotide
aggacttgccatcgtagaactgctg

SEQ ID NO: 1480 - DNA, 25 bp, Artificial Sequence
  Synthetic Oligonucleotide
aggacttgccatcgtagaactgctg

SEQ ID NO: 1481 - DNA, 25 bp, Artificial Sequence
  Synthetic Oligonucleotide
cagcagttctacgatggcaagtcct

SEQ ID NO: 1482 - DNA, 25 bp, Artificial Sequence
  Synthetic Oligonucleotide
aggacttgccatcgtagaactgctg

SEQ ID NO: 1483 - DNA, 25 bp, Artificial Sequence
  Synthetic Oligonucleotide
aggacttgccatcgtagaactgctg

SEQ ID NO: 1484 - DNA, 25 bp, Artificial Sequence
  Synthetic Oligonucleotide
cagcagttctacgatggcaagtcct

SEQ ID NO: 1485 - DNA, 25 bp, Artificial Sequence
  Synthetic Oligonucleotide
aggacttgccatcgtagaactgctg

SEQ ID NO: 1486 - DNA, 25 bp, Artificial Sequence
  Synthetic Oligonucleotide
aggacttgccatcgtagaactgctg

SEQ ID NO: 1487 - DNA, 25 bp, Artificial Sequence
  Synthetic Oligonucleotide
cagcagttctacgatggcaagtcct

SEQ ID NO: 1488 - DNA, 25 bp, Artificial Sequence
  Synthetic Oligonucleotide
aggacttgccatcgtagaactgctg

SEQ ID NO: 1489 - DNA, 25 bp, Artificial Sequence
  Synthetic Oligonucleotide
aggacttgccatcgtagaactgctg

SEQ ID NO: 1490 - DNA, 25 bp, Artificial Sequence
  Synthetic Oligonucleotide
cagcagttctacgatggcaagtcct

SEQ ID NO: 1491 - DNA, 25 bp, Artificial Sequence
  Synthetic Oligonucleotide
aggacttgccatcgtagaactgctg

SEQ ID NO: 1492 - DNA, 25 bp, Artificial Sequence
  Synthetic Oligonucleotide
acagaattatgcataccctggcgaa

SEQ ID NO: 1493 - DNA, 25 bp, Artificial Sequence
  Synthetic Oligonucleotide
cctagggctaagtggtcgctggcaa

SEQ ID NO: 1494 - DNA, 25 bp, Artificial Sequence
  Synthetic Oligonucleotide
catatggttccgtggcatggcatag

SEQ ID NO: 1495 - DNA, 25 bp, Artificial Sequence
  Synthetic Oligonucleotide
gacatggccggctcgcatgaatctg

SEQ ID NO: 1496 - DNA, 25 bp, Artificial Sequence
  Synthetic Oligonucleotide
tatggcagtgtctcacttgaaaggt

SEQ ID NO: 1497 - DNA, 25 bp, Artificial Sequence
  Synthetic Oligonucleotide
aacgtggtcattgttgttagaaagg

SEQ ID NO: 1498 - DNA, 25 bp, Artificial Sequence
  Synthetic Oligonucleotide
tatccggccaacatttgaaacaggt

SEQ ID NO: 1499 - DNA, 25 bp, Artificial Sequence
  Synthetic Oligonucleotide
atcccgaaaacaggagtcaattacc

SEQ ID NO: 1500 - DNA, 25 bp, Artificial Sequence
  Synthetic Oligonucleotide
tacctaaaagtcggggttaaaaact

SEQ ID NO: 1501 - DNA, 25 bp, Artificial Sequence
  Synthetic Oligonucleotide
aatcttgaatcagggttacattaat

SEQ ID NO: 1502 - DNA, 25 bp, Artificial Sequence
  Synthetic Oligonucleotide
gtccatttatcaagtgttactttgc

SEQ ID NO: 1503 - DNA, 25 bp, Artificial Sequence
  Synthetic Oligonucleotide
gttctatcttggaggttaggtctgc

SEQ ID NO: 1504 - DNA, 25 bp, Artificial Sequence
  Synthetic Oligonucleotide
ccctgttgtttgaggtaaggtccga

SEQ ID NO: 1505 - DNA, 25 bp, Artificial Sequence
  Synthetic Oligonucleotide
ggtagtgcggtgacgaaaggtctcc

SEQ ID NO: 1506 - DNA, 25 bp, Artificial Sequence
  Synthetic Oligonucleotide
acgcgagttgaattacaaattccgc

SEQ ID NO: 1507 - DNA, 25 bp, Artificial Sequence
  Synthetic Oligonucleotide
ttcaacgatggacaaccattccccg

SEQ ID NO: 1508 - DNA, 25 bp, Artificial Sequence
  Synthetic Oligonucleotide
ccgcagtcggtacaagatggccgcc

SEQ ID NO: 1509 - DNA, 25 bp, Artificial Sequence
  Synthetic Oligonucleotide
gcagacgtttccaaagtcgggcggc

SEQ ID NO: 1510 - DNA, 25 bp, Artificial Sequence
  Synthetic Oligonucleotide
tgccaccttccgacttgggaacatt

SEQ ID NO: 1511 - DNA, 25 bp, Artificial Sequence
  Synthetic Oligonucleotide
acctcagtccctctcttggggtttg

SEQ ID NO: 1512 - DNA, 25 bp, Artificial Sequence
  Synthetic Oligonucleotide
ttgaaacccgtgtgtcggagatgtg

SEQ ID NO: 1513 - DNA, 25 bp, Artificial Sequence
  Synthetic Oligonucleotide
tgccagtccccgtgacgacggattt

SEQ ID NO: 1514 - DNA, 25 bp, Artificial Sequence
  Synthetic Oligonucleotide
atcgcccagggcttgaacggctgct

SEQ ID NO: 1515 - DNA, 25 bp, Artificial Sequence
  Synthetic Oligonucleotide
gaggtacagcagcgtcaaccactgc

SEQ ID NO: 1516 - DNA, 25 bp, Artificial Sequence
  Synthetic Oligonucleotide
gtggagccggagcgtttcacgaccc

SEQ ID NO: 1517 - DNA, 25 bp, Artificial Sequence
  Synthetic Oligonucleotide
gtcctccagtacatttgcctaccac

SEQ ID NO: 1518 - DNA, 25 bp, Artificial Sequence
  Synthetic Oligonucleotide
ctaagtagacgtattcgtctcctga

SEQ ID NO: 1519 - DNA, 25 bp, Artificial Sequence
  Synthetic Oligonucleotide
tcaatagatagtaatgcacctacta

SEQ ID NO: 1520 - DNA, 25 bp, Artificial Sequence
  Synthetic Oligonucleotide
cagcagttctacgatggcaagtcct

SEQ ID NO: 1521 - DNA, 25 bp, Artificial Sequence
  Synthetic Oligonucleotide
aggacttgccatcgtagaactgctg

SEQ ID NO: 1522 - DNA, 25 bp, Artificial Sequence
  Synthetic Oligonucleotide
accatccgtgccgctgatggtagct

SEQ ID NO: 1523 - DNA, 25 bp, Artificial Sequence
  Synthetic Oligonucleotide
ccggctgccgaagagctttggtatt

SEQ ID NO: 1524 - DNA, 25 bp, Artificial Sequence
  Synthetic Oligonucleotide
gcagctgctggaacggcttttgctg

SEQ ID NO: 1525 - DNA, 25 bp, Artificial Sequence
  Synthetic Oligonucleotide
ggcaaccgccggaggacttggaacc

SEQ ID NO: 1526 - DNA, 25 bp, Artificial Sequence
  Synthetic Oligonucleotide
agctgccatcggaccatccggaaat

SEQ ID NO: 1527 - DNA, 25 bp, Artificial Sequence
  Synthetic Oligonucleotide
tcccaatggaggtgtatcgataaat

SEQ ID NO: 1528 - DNA, 25 bp, Artificial Sequence
  Synthetic Oligonucleotide
tccctgctcgaacttcgccggcacc

SEQ ID NO: 1529 - DNA, 25 bp, Artificial Sequence
  Synthetic Oligonucleotide
tttacgcctcgactggctcggccga

SEQ ID NO: 1530 - DNA, 25 bp, Artificial Sequence
  Synthetic Oligonucleotide
tgaaaacccggtaggtaaggaccga

SEQ ID NO: 1531 - DNA, 25 bp, Artificial Sequence
  Synthetic Oligonucleotide
gtaaataaaccgaggagcacaacca

SEQ ID NO: 1532 - DNA, 25 bp, Artificial Sequence
  Synthetic Oligonucleotide
aggacttgccatcgtagaactgctg

SEQ ID NO: 1533 - DNA, 25 bp, Artificial Sequence
  Synthetic Oligonucleotide
cagcagttctacgatggcaagtcct

SEQ ID NO: 1534 - DNA, 25 bp, Artificial Sequence
  Synthetic Oligonucleotide
cagcagttctacgatggcaagtcct

SEQ ID NO: 1535 - DNA, 25 bp, Artificial Sequence
  Synthetic Oligonucleotide
cagcagttctacgatggcaagtcct

SEQ ID NO: 1536 - DNA, 25 bp, Artificial Sequence
  Synthetic Oligonucleotide
aggacttgccatcgtagaactgctg

SEQ ID NO: 1537 - DNA, 25 bp, Artificial Sequence
  Synthetic Oligonucleotide
aggacttgccatcgtagaactgctg

SEQ ID NO: 1538 - DNA, 25 bp, Artificial Sequence
  Synthetic Oligonucleotide
cagcagttctacgatggcaagtcct

SEQ ID NO: 1539 - DNA, 25 bp, Artificial Sequence
  Synthetic Oligonucleotide
cagcagttctacgatggcaagtcct

SEQ ID NO: 1540 - DNA, 25 bp, Artificial Sequence
  Synthetic Oligonucleotide
cagcagttctacgatggcaagtcct

SEQ ID NO: 1541 - DNA, 25 bp, Artificial Sequence
  Synthetic Oligonucleotide
aggacttgccatcgtagaactgctg

SEQ ID NO: 1542 - DNA, 25 bp, Artificial Sequence
  Synthetic Oligonucleotide
cagcagttctacgatggcaagtcct

SEQ ID NO: 1543 - DNA, 25 bp, Artificial Sequence
  Synthetic Oligonucleotide
aggacttgccatcgtagaactgctg

SEQ ID NO: 1544 - DNA, 25 bp, Artificial Sequence
  Synthetic Oligonucleotide
aggacttgccatcgtagaactgctg

SEQ ID NO: 1545 - DNA, 25 bp, Artificial Sequence
  Synthetic Oligonucleotide
aggacttgccatcgtagaactgctg

SEQ ID NO: 1546 - DNA, 25 bp, Artificial Sequence
  Synthetic Oligonucleotide
cagcagttctacgatggcaagtcct

SEQ ID NO: 1547 - DNA, 25 bp, Artificial Sequence
  Synthetic Oligonucleotide
aggacttgccatcgtagaactgctg

SEQ ID NO: 1548 - DNA, 25 bp, Artificial Sequence
  Synthetic Oligonucleotide
cagcagttctacgatggcaagtcct

SEQ ID NO: 1549 - DNA, 25 bp, Artificial Sequence
  Synthetic Oligonucleotide
cagcagttctacgatggcaagtcct

SEQ ID NO: 1550 - DNA, 25 bp, Artificial Sequence
  Synthetic Oligonucleotide
cagcagttctacgatggcaagtcct

SEQ ID NO: 1551 - DNA, 25 bp, Artificial Sequence
  Synthetic Oligonucleotide
aggacttgccatcgtagaactgctg

SEQ ID NO: 1552 - DNA, 25 bp, Artificial Sequence
  Synthetic Oligonucleotide
aggacttgccatcgtagaactgctg

SEQ ID NO: 1553 - DNA, 25 bp, Artificial Sequence
  Synthetic Oligonucleotide
cagcagttctacgatggcaagtcct

SEQ ID NO: 1554 - DNA, 25 bp, Artificial Sequence
  Synthetic Oligonucleotide
cagcagttctacgatggcaagtcct

SEQ ID NO: 1555 - DNA, 25 bp, Artificial Sequence
  Synthetic Oligonucleotide
cagcagttctacgatggcaagtcct

SEQ ID NO: 1556 - DNA, 25 bp, Artificial Sequence
  Synthetic Oligonucleotide
aggacttgccatcgtagaactgctg

SEQ ID NO: 1557 - DNA, 25 bp, Artificial Sequence
  Synthetic Oligonucleotide
cagcagttctacgatggcaagtcct

SEQ ID NO: 1558 - DNA, 25 bp, Artificial Sequence
  Synthetic Oligonucleotide
aggacttgccatcgtagaactgctg

SEQ ID NO: 1559 - DNA, 25 bp, Artificial Sequence
  Synthetic Oligonucleotide
aggacttgccatcgtagaactgctg

SEQ ID NO: 1560 - DNA, 25 bp, Artificial Sequence
  Synthetic Oligonucleotide
aggacttgccatcgtagaactgctg

SEQ ID NO: 1561 - DNA, 25 bp, Artificial Sequence
  Synthetic Oligonucleotide
cagcagttctacgatggcaagtcct

SEQ ID NO: 1562 - DNA, 25 bp, Artificial Sequence
  Synthetic Oligonucleotide
aggacttgccatcgtagaactgctg

SEQ ID NO: 1563 - DNA, 25 bp, Artificial Sequence
  Synthetic Oligonucleotide
aggacttgccatcgtagaactgctg

SEQ ID NO: 1564 - DNA, 25 bp, Artificial Sequence
  Synthetic Oligonucleotide
cagcagttctacgatggcaagtcct

SEQ ID NO: 1565 - DNA, 25 bp, Artificial Sequence
  Synthetic Oligonucleotide
aggacttgccatcgtagaactgctg

SEQ ID NO: 1566 - DNA, 25 bp, Artificial Sequence
  Synthetic Oligonucleotide
aggacttgccatcgtagaactgctg

SEQ ID NO: 1567 - DNA, 25 bp, Artificial Sequence
  Synthetic Oligonucleotide
cagcagttctacgatggcaagtcct

SEQ ID NO: 1568 - DNA, 25 bp, Artificial Sequence
  Synthetic Oligonucleotide
aggacttgccatcgtagaactgctg

SEQ ID NO: 1569 - DNA, 25 bp, Artificial Sequence
  Synthetic Oligonucleotide
aggacttgccatcgtagaactgctg

SEQ ID NO: 1570 - DNA, 25 bp, Artificial Sequence
  Synthetic Oligonucleotide
aggacttgccatcgtagaactgctg

SEQ ID NO: 1571 - DNA, 25 bp, Artificial Sequence
  Synthetic Oligonucleotide
aggacttgccatcgtagaactgctg

SEQ ID NO: 1572 - DNA, 25 bp, Artificial Sequence
  Synthetic Oligonucleotide
ataagccacgatagtgtgatcatta

SEQ ID NO: 1573 - DNA, 25 bp, Artificial Sequence
  Synthetic Oligonucleotide
cacaagaaccacaaggtgtaaatta

SEQ ID NO: 1574 - DNA, 25 bp, Artificial Sequence
  Synthetic Oligonucleotide
cctaaggaatttacaggaactattg

SEQ ID NO: 1575 - DNA, 25 bp, Artificial Sequence
  Synthetic Oligonucleotide
catgctttagtcacggaaacttgtg

SEQ ID NO: 1576 - DNA, 25 bp, Artificial Sequence
  Synthetic Oligonucleotide
aggacttgccatcgtagaactgctg

SEQ ID NO: 1577 - DNA, 25 bp, Artificial Sequence
  Synthetic Oligonucleotide
aggacttgccatcgtagaactgctg

SEQ ID NO: 1578 - DNA, 25 bp, Artificial Sequence
  Synthetic Oligonucleotide
cagcagttctacgatggcaagtcct

SEQ ID NO: 1579 - DNA, 25 bp, Artificial Sequence
  Synthetic Oligonucleotide
aggacttgccatcgtagaactgctg

SEQ ID NO: 1580 - DNA, 25 bp, Artificial Sequence
  Synthetic Oligonucleotide
aggacttgccatcgtagaactgctg

SEQ ID NO: 1581 - DNA, 25 bp, Artificial Sequence
  Synthetic Oligonucleotide
cagcagttctacgatggcaagtcct

SEQ ID NO: 1582 - DNA, 25 bp, Artificial Sequence
  Synthetic Oligonucleotide
cagcagttctacgatggcaagtcct

SEQ ID NO: 1583 - DNA, 25 bp, Artificial Sequence
  Synthetic Oligonucleotide
cagcagttctacgatggcaagtcct

SEQ ID NO: 1584 - DNA, 25 bp, Artificial Sequence
  Synthetic Oligonucleotide
cagcagttctacgatggcaagtcct

SEQ ID NO: 1585 - DNA, 25 bp, Artificial Sequence
  Synthetic Oligonucleotide
cagcagttctacgatggcaagtcct

SEQ ID NO: 1586 - DNA, 25 bp, Artificial Sequence
  Synthetic Oligonucleotide
cagcagttctacgatggcaagtcct

SEQ ID NO: 1587 - DNA, 25 bp, Artificial Sequence
  Synthetic Oligonucleotide
cagcagttctacgatggcaagtcct

SEQ ID NO: 1588 - DNA, 25 bp, Artificial Sequence
  Synthetic Oligonucleotide
cagcagttctacgatggcaagtcct

SEQ ID NO: 1589 - DNA, 25 bp, Artificial Sequence
  Synthetic Oligonucleotide
cagcagttctacgatggcaagtcct

SEQ ID NO: 1590 - DNA, 25 bp, Artificial Sequence
  Synthetic Oligonucleotide
aggacttgccatcgtagaactgctg

SEQ ID NO: 1591 - DNA, 25 bp, Artificial Sequence
  Synthetic Oligonucleotide
aggacttgccatcgtagaactgctg

SEQ ID NO: 1592 - DNA, 25 bp, Artificial Sequence
  Synthetic Oligonucleotide
aggacttgccatcgtagaactgctg

SEQ ID NO: 1593 - DNA, 25 bp, Artificial Sequence
  Synthetic Oligonucleotide
cagcagttctacgatggcaagtcct

SEQ ID NO: 1594 - DNA, 25 bp, Artificial Sequence
  Synthetic Oligonucleotide
aggacttgccatcgtagaactgctg

SEQ ID NO: 1595 - DNA, 25 bp, Artificial Sequence
  Synthetic Oligonucleotide
aggacttgccatcgtagaactgctg

SEQ ID NO: 1596 - DNA, 25 bp, Artificial Sequence
  Synthetic Oligonucleotide
aggacttgccatcgtagaactgctg

SEQ ID NO: 1597 - DNA, 25 bp, Artificial Sequence
  Synthetic Oligonucleotide
cagcagttctacgatggcaagtcct

SEQ ID NO: 1598 - DNA, 25 bp, Artificial Sequence
  Synthetic Oligonucleotide
cagcagttctacgatggcaagtcct

SEQ ID NO: 1599 - DNA, 25 bp, Artificial Sequence
  Synthetic Oligonucleotide
aggacttgccatcgtagaactgctg

SEQ ID NO: 1600 - DNA, 25 bp, Artificial Sequence
  Synthetic Oligonucleotide
aggacttgccatcgtagaactgctg

SEQ ID NO: 1601 - DNA, 25 bp, Artificial Sequence
  Synthetic Oligonucleotide
gagttaagcaacatcttccatacta

SEQ ID NO: 1602 - DNA, 25 bp, Artificial Sequence
  Synthetic Oligonucleotide
gttggttaacgcactttttcaacct

SEQ ID NO: 1603 - DNA, 25 bp, Artificial Sequence
  Synthetic Oligonucleotide
ctaattaaacgctctttagttggcc

SEQ ID NO: 1604 - DNA, 25 bp, Artificial Sequence
  Synthetic Oligonucleotide
tcgtaaaagggttccatttcggtcc

SEQ ID NO: 1605 - DNA, 25 bp, Artificial Sequence
  Synthetic Oligonucleotide
ttcttgctggttaccttttggtgat

SEQ ID NO: 1606 - DNA, 25 bp, Artificial Sequence
  Synthetic Oligonucleotide
tacctaccgggttttcaatttgtta

SEQ ID NO: 1607 - DNA, 25 bp, Artificial Sequence
  Synthetic Oligonucleotide
tacccgtgggaaattttgtcattgt

SEQ ID NO: 1608 - DNA, 25 bp, Artificial Sequence
  Synthetic Oligonucleotide
cccggtgggcctcgagcaacatctt

SEQ ID NO: 1609 - DNA, 25 bp, Artificial Sequence
  Synthetic Oligonucleotide
gctcctcgtccgggaataaaccgtt

SEQ ID NO: 1610 - DNA, 25 bp, Artificial Sequence
  Synthetic Oligonucleotide
tgtctccctcgaaccctaagactga

SEQ ID NO: 1611 - DNA, 25 bp, Artificial Sequence
  Synthetic Oligonucleotide
ctatcccgtctgcaagcttacccag

SEQ ID NO: 1612 - DNA, 25 bp, Artificial Sequence
  Synthetic Oligonucleotide
cttcggccggaacgtgtaccgcctg

SEQ ID NO: 1613 - DNA, 25 bp, Artificial Sequence
  Synthetic Oligonucleotide
tatcttggtggttaggtctgcctca

SEQ ID NO: 1614 - DNA, 25 bp, Artificial Sequence
  Synthetic Oligonucleotide
ttaccggtaattcgaggttggatga

SEQ ID NO: 1615 - DNA, 25 bp, Artificial Sequence
  Synthetic Oligonucleotide
gtaccttcattacatttacggtttg

SEQ ID NO: 1616 - DNA, 25 bp, Artificial Sequence
  Synthetic Oligonucleotide
gtagcaaataccaatcttgatcccg

SEQ ID NO: 1617 - DNA, 25 bp, Artificial Sequence
  Synthetic Oligonucleotide
gggggatagaaataacactgctccc

SEQ ID NO: 1618 - DNA, 25 bp, Artificial Sequence
  Synthetic Oligonucleotide
gtaggaggttgacaaaaggccgctt

SEQ ID NO: 1619 - DNA, 25 bp, Artificial Sequence
  Synthetic Oligonucleotide
gggatccccgcagcagtggccgctt

SEQ ID NO: 1620 - DNA, 25 bp, Artificial Sequence
  Synthetic Oligonucleotide
agaccgaccagcttctgggcccgtt

SEQ ID NO: 1621 - DNA, 25 bp, Artificial Sequence
  Synthetic Oligonucleotide
gataggcccagcatttaagaccttt

SEQ ID NO: 1622 - DNA, 25 bp, Artificial Sequence
  Synthetic Oligonucleotide
tggcccaaccaaaactagactattt

SEQ ID NO: 1623 - DNA, 25 bp, Artificial Sequence
  Synthetic Oligonucleotide
tccgccgaccgaggaatgccaatgg

SEQ ID NO: 1624 - DNA, 25 bp, Artificial Sequence
  Synthetic Oligonucleotide
gctgctagggctgaaagaaccatgc

SEQ ID NO: 1625 - DNA, 25 bp, Artificial Sequence
  Synthetic Oligonucleotide
ctggggctataagtcgagccctacc

SEQ ID NO: 1626 - DNA, 25 bp, Artificial Sequence
  Synthetic Oligonucleotide
tgtgcctcatgaacgcgaggccgcc

SEQ ID NO: 1627 - DNA, 25 bp, Artificial Sequence
  Synthetic Oligonucleotide
gacactcctagaagtaatccaccag

SEQ ID NO: 1628 - DNA, 25 bp, Artificial Sequence
  Synthetic Oligonucleotide
ggaataacacgtagacgtaccctta

SEQ ID NO: 1629 - DNA, 25 bp, Artificial Sequence
  Synthetic Oligonucleotide
aggacttgccatcgtagaactgctg

SEQ ID NO: 1630 - DNA, 25 bp, Artificial Sequence
  Synthetic Oligonucleotide
cagcagttctacgatggcaagtcct

SEQ ID NO: 1631 - DNA, 25 bp, Artificial Sequence
  Synthetic Oligonucleotide
accatccgtgcccctgatggtagct

SEQ ID NO: 1632 - DNA, 25 bp, Artificial Sequence
  Synthetic Oligonucleotide
ccggctgccgaacagctttggtatt

SEQ ID NO: 1633 - DNA, 25 bp, Artificial Sequence
  Synthetic Oligonucleotide
gcagctgctggatcggcttttgctg

SEQ ID NO: 1634 - DNA, 25 bp, Artificial Sequence
  Synthetic Oligonucleotide
ggcaaccgccggtggacttggaacc

SEQ ID NO: 1635 - DNA, 25 bp, Artificial Sequence
  Synthetic Oligonucleotide
agctgccatcggtccatccggaaat

SEQ ID NO: 1636 - DNA, 25 bp, Artificial Sequence
  Synthetic Oligonucleotide
tcccaatggaggagtatcgataaat

SEQ ID NO: 1637 - DNA, 25 bp, Artificial Sequence
  Synthetic Oligonucleotide
tccctgctcgaagttcgccggcacc

SEQ ID NO: 1638 - DNA, 25 bp, Artificial Sequence
  Synthetic Oligonucleotide
tttacgcctcgagtggctcggccga

SEQ ID NO: 1639 - DNA, 25 bp, Artificial Sequence
  Synthetic Oligonucleotide
tgaaaacccggttggtaaggaccga

SEQ ID NO: 1640 - DNA, 25 bp, Artificial Sequence
  Synthetic Oligonucleotide
gtaaataaaccgtggagcacaacca

SEQ ID NO: 1641 - DNA, 25 bp, Artificial Sequence
  Synthetic Oligonucleotide
ataagccacgattgtgtgatcatta

SEQ ID NO: 1642 - DNA, 25 bp, Artificial Sequence
  Synthetic Oligonucleotide
cacaagaaccactaggtgtaaatta

SEQ ID NO: 1643 - DNA, 25 bp, Artificial Sequence
  Synthetic Oligonucleotide
cctaaggaattttcaggaactattg

SEQ ID NO: 1644 - DNA, 25 bp, Artificial Sequence
  Synthetic Oligonucleotide
catgctttagtctcggaaacttgtg

SEQ ID NO: 1645 - DNA, 25 bp, Artificial Sequence
  Synthetic Oligonucleotide
gagttaagcaacttcttccatacta

SEQ ID NO: 1646 - DNA, 25 bp, Artificial Sequence
  Synthetic Oligonucleotide
gttggttaacgctctttttcaacct

SEQ ID NO: 1647 - DNA, 25 bp, Artificial Sequence
  Synthetic Oligonucleotide
ctaattaaacgcactttagttggcc

SEQ ID NO: 1648 - DNA, 25 bp, Artificial Sequence
  Synthetic Oligonucleotide
tcgtaaaagggtaccatttcggtcc

SEQ ID NO: 1649 - DNA, 25 bp, Artificial Sequence
  Synthetic Oligonucleotide
ttcttgctggtttccttttggtgat

SEQ ID NO: 1650 - DNA, 25 bp, Artificial Sequence
  Synthetic Oligonucleotide
tacctaccgggtattcaatttgtta

SEQ ID NO: 1651 - DNA, 25 bp, Artificial Sequence
  Synthetic Oligonucleotide
tacccgtgggaatttttgtcattgt

SEQ ID NO: 1652 - DNA, 25 bp, Artificial Sequence
  Synthetic Oligonucleotide
cccggtgggcctggagcaacatctt

SEQ ID NO: 1653 - DNA, 25 bp, Artificial Sequence
  Synthetic Oligonucleotide
gctcctcgtccgcgaataaaccgtt

SEQ ID NO: 1654 - DNA, 25 bp, Artificial Sequence
  Synthetic Oligonucleotide
tgtctccctcgatccctaagactga

SEQ ID NO: 1655 - DNA, 25 bp, Artificial Sequence
  Synthetic Oligonucleotide
ctatcccgtctggaagcttacccag

SEQ ID NO: 1656 - DNA, 25 bp, Artificial Sequence
  Synthetic Oligonucleotide
cttcggccggaaggtgtaccgcctg

SEQ ID NO: 1657 - DNA, 25 bp, Artificial Sequence
  Synthetic Oligonucleotide
tatcttggtggtaaggtctgcctca

SEQ ID NO: 1658 - DNA, 25 bp, Artificial Sequence
  Synthetic Oligonucleotide
ttaccggtaattggaggttggatga

SEQ ID NO: 1659 - DNA, 25 bp, Artificial Sequence
  Synthetic Oligonucleotide
gtaccttcattagatttacggtttg

SEQ ID NO: 1660 - DNA, 25 bp, Artificial Sequence
  Synthetic Oligonucleotide
gtagcaaatacctatcttgatcccg

SEQ ID NO: 1661 - DNA, 25 bp, Artificial Sequence
  Synthetic Oligonucleotide
gggggatagaaaaaacactgctccc

SEQ ID NO: 1662 - DNA, 25 bp, Artificial Sequence
  Synthetic Oligonucleotide
gtaggaggttgagaaaaggccgctt

SEQ ID NO: 1663 - DNA, 25 bp, Artificial Sequence
  Synthetic Oligonucleotide
gggatccccgcaccagtggccgctt

SEQ ID NO: 1664 - DNA, 25 bp, Artificial Sequence
  Synthetic Oligonucleotide
agaccgaccagcatctgggcccgtt

SEQ ID NO: 1665 - DNA, 25 bp, Artificial Sequence
  Synthetic Oligonucleotide
gataggcccagcttttaagaccttt

SEQ ID NO: 1666 - DNA, 25 bp, Artificial Sequence
  Synthetic Oligonucleotide
tggcccaaccaatactagactattt

SEQ ID NO: 1667 - DNA, 25 bp, Artificial Sequence
  Synthetic Oligonucleotide
tccgccgaccgacgaatgccaatgg

SEQ ID NO: 1668 - DNA, 25 bp, Artificial Sequence
  Synthetic Oligonucleotide
gctgctagggctcaaagaaccatgc

SEQ ID NO: 1669 - DNA, 25 bp, Artificial Sequence
  Synthetic Oligonucleotide
ctggggctataactcgagccctacc

SEQ ID NO: 1670 - DNA, 25 bp, Artificial Sequence
  Synthetic Oligonucleotide
tgtgcctcatgatcgcgaggccgcc

SEQ ID NO: 1671 - DNA, 25 bp, Artificial Sequence
  Synthetic Oligonucleotide
gacactcctagatgtaatccaccag

SEQ ID NO: 1672 - DNA, 25 bp, Artificial Sequence
  Synthetic Oligonucleotide
ggaataacacgttgacgtaccctta

SEQ ID NO: 1673 - DNA, 25 bp, Artificial Sequence
  Synthetic Oligonucleotide
cagcagttctacgatggcaagtcct

SEQ ID NO: 1674 - DNA, 25 bp, Artificial Sequence
  Synthetic Oligonucleotide
aggacttgccatcgtagaactgctg

SEQ ID NO: 1675 - DNA, 25 bp, Artificial Sequence
  Synthetic Oligonucleotide
ggggactcggactcctgttccacct

SEQ ID NO: 1676 - DNA, 25 bp, Artificial Sequence
  Synthetic Oligonucleotide
gcgtccaagtggatgcctttggaac

SEQ ID NO: 1677 - DNA, 25 bp, Artificial Sequence
  Synthetic Oligonucleotide
ggtccaatggggaccgtctgcatac

SEQ ID NO: 1678 - DNA, 25 bp, Artificial Sequence
  Synthetic Oligonucleotide
gcgcctacagggtcattgggtccta

SEQ ID NO: 1679 - DNA, 25 bp, Artificial Sequence
  Synthetic Oligonucleotide
gggcaatgggcaacgttggtaccat

SEQ ID NO: 1680 - DNA, 25 bp, Artificial Sequence
  Synthetic Oligonucleotide
ttcaattaagtgaaactgagtccta

SEQ ID NO: 1681 - DNA, 25 bp, Artificial Sequence
  Synthetic Oligonucleotide
acatcaaagtacctacggtgtccta

SEQ ID NO: 1682 - DNA, 25 bp, Artificial Sequence
  Synthetic Oligonucleotide
tcgagcacgattggtcgcagacctg

SEQ ID NO: 1683 - DNA, 25 bp, Artificial Sequence
  Synthetic Oligonucleotide
acgaacggcagctcggtccaccatg

SEQ ID NO: 1684 - DNA, 25 bp, Artificial Sequence
  Synthetic Oligonucleotide
cgacaggaggacacgggagccccca

SEQ ID NO: 1685 - DNA, 25 bp, Artificial Sequence
  Synthetic Oligonucleotide
cctgcagccttgcagagcccgtcaa

SEQ ID NO: 1686 - DNA, 25 bp, Artificial Sequence
  Synthetic Oligonucleotide
ttgacgggctctgcaaggctgcagg

SEQ ID NO: 1687 - DNA, 25 bp, Artificial Sequence
  Synthetic Oligonucleotide
tccagggcctccaagaggtccagta

SEQ ID NO: 1688 - DNA, 25 bp, Artificial Sequence
  Synthetic Oligonucleotide
ggttaaggccccactattcgacaat

SEQ ID NO: 1689 - DNA, 25 bp, Artificial Sequence
  Synthetic Oligonucleotide
agtttttaacccggacttttaggta

SEQ ID NO: 1690 - DNA, 25 bp, Artificial Sequence
  Synthetic Oligonucleotide
tttccttaacgaggaatagttttgc

SEQ ID NO: 1691 - DNA, 25 bp, Artificial Sequence
  Synthetic Oligonucleotide
tatattcttgaggtggccattatgc

SEQ ID NO: 1692 - DNA, 25 bp, Artificial Sequence
  Synthetic Oligonucleotide
cagtttagagatggccggtttagct

SEQ ID NO: 1693 - DNA, 25 bp, Artificial Sequence
  Synthetic Oligonucleotide
tctctagattccggcagtggacgcg

SEQ ID NO: 1694 - DNA, 25 bp, Artificial Sequence
  Synthetic Oligonucleotide
gtggtttcgattacccctgaggctc

SEQ ID NO: 1695 - DNA, 25 bp, Artificial Sequence
  Synthetic Oligonucleotide
gtaggtttccttacctccaagaaag

SEQ ID NO: 1696 - DNA, 25 bp, Artificial Sequence
  Synthetic Oligonucleotide
gaagagtggcttctcttcccagaag

SEQ ID NO: 1697 - DNA, 25 bp, Artificial Sequence
  Synthetic Oligonucleotide
ggaacggcttttgctgcacgaacgg

SEQ ID NO: 1698 - DNA, 25 bp, Artificial Sequence
  Synthetic Oligonucleotide
cgaaacaactttttctgaagacttg

SEQ ID NO: 1699 - DNA, 25 bp, Artificial Sequence
  Synthetic Oligonucleotide
gagcaccaactgaggctgctgcttg

SEQ ID NO: 1700 - DNA, 25 bp, Artificial Sequence
  Synthetic Oligonucleotide
ctgctgccacataggcagctgctgg

SEQ ID NO: 1701 - DNA, 25 bp, Artificial Sequence
  Synthetic Oligonucleotide
tacgggcccatgtaccaccacgggg

SEQ ID NO: 1702 - DNA, 25 bp, Artificial Sequence
  Synthetic Oligonucleotide
tacgggcccatgtaccaccacgggg

SEQ ID NO: 1703 - DNA, 25 bp, Artificial Sequence
  Synthetic Oligonucleotide
gaagggcaactactgttcaaagggc

SEQ ID NO: 1704 - DNA, 25 bp, Artificial Sequence
  Synthetic Oligonucleotide
ttagaaccctctattgtcaagggga

SEQ ID NO: 1705 - DNA, 25 bp, Artificial Sequence
  Synthetic Oligonucleotide
tgttcagatctttggtctgatggga

SEQ ID NO: 1706 - DNA, 25 bp, Artificial Sequence
  Synthetic Oligonucleotide
tgactgacctcctggcttgggtgag

SEQ ID NO: 1707 - DNA, 25 bp, Artificial Sequence
  Synthetic Oligonucleotide
tgccacataggcagctgctggaacg

SEQ ID NO: 1708 - DNA, 25 bp, Artificial Sequence
  Synthetic Oligonucleotide
gatcaataggcgacgtgtgtgaatc

SEQ ID NO: 1709 - DNA, 25 bp, Artificial Sequence
  Synthetic Oligonucleotide
gaaattgaagggagtctagtgagaa

SEQ ID NO: 1710 - DNA, 25 bp, Artificial Sequence
  Synthetic Oligonucleotide
ctagaaaaaggttttctatagctca

SEQ ID NO: 1711 - DNA, 25 bp, Artificial Sequence
  Synthetic Oligonucleotide
taagtgaaattgaacttcatgtcca

SEQ ID NO: 1712 - DNA, 25 bp, Artificial Sequence
  Synthetic Oligonucleotide
taaacaagtttcattatcatggccg

SEQ ID NO: 1713 - DNA, 25 bp, Artificial Sequence
  Synthetic Oligonucleotide
ttaaatgtcaacatttacgtttggc

SEQ ID NO: 1714 - DNA, 25 bp, Artificial Sequence
  Synthetic Oligonucleotide
ttaagaacaaacagtttgttctgcc

SEQ ID NO: 1715 - DNA, 25 bp, Artificial Sequence
  Synthetic Oligonucleotide
aaagaaagaccacctcgatgttgga

SEQ ID NO: 1716 - DNA, 25 bp, Artificial Sequence
  Synthetic Oligonucleotide
agtggaagatcagcttatgatcata

SEQ ID NO: 1717 - DNA, 25 bp, Artificial Sequence
  Synthetic Oligonucleotide
ggaaggtgctacggtttcaacagta

SEQ ID NO: 1718 - DNA, 25 bp, Artificial Sequence
  Synthetic Oligonucleotide
actctctcctccggagtctaacata

SEQ ID NO: 1719 - DNA, 25 bp, Artificial Sequence
  Synthetic Oligonucleotide
actctaccgcctttgactcatacta

SEQ ID NO: 1720 - DNA, 25 bp, Artificial Sequence
  Synthetic Oligonucleotide
cacgacactccgtacgacctccata

SEQ ID NO: 1721 - DNA, 25 bp, Artificial Sequence
  Synthetic Oligonucleotide
tcacgactgcgtagaacggcgacta

SEQ ID NO: 1722 - DNA, 25 bp, Artificial Sequence
  Synthetic Oligonucleotide
gggaacatcacctcgccgaagggcc

SEQ ID NO: 1723 - DNA, 25 bp, Artificial Sequence
  Synthetic Oligonucleotide
aggcactgcaatagcggaagggctt

SEQ ID NO: 1724 - DNA, 25 bp, Artificial Sequence
  Synthetic Oligonucleotide
actacgagaaatccgaaaggtcctt

SEQ ID NO: 1725 - DNA, 25 bp, Artificial Sequence
  Synthetic Oligonucleotide
cctagaagtactccatcaggcagtc

SEQ ID NO: 1726 - DNA, 25 bp, Artificial Sequence
  Synthetic Oligonucleotide
gagccaatgtaccaagaattacaac

SEQ ID NO: 1727 - DNA, 25 bp, Artificial Sequence
  Synthetic Oligonucleotide
tgccaaggaccaatggacttcgaat

SEQ ID NO: 1728 - DNA, 25 bp, Artificial Sequence
  Synthetic Oligonucleotide
gtcgcgcagcgataacgcatttgga

SEQ ID NO: 1729 - DNA, 25 bp, Artificial Sequence
  Synthetic Oligonucleotide
gcgaaagcgaaacgcgcggctgagg

SEQ ID NO: 1730 - DNA, 25 bp, Artificial Sequence
  Synthetic Oligonucleotide
agtacctcagctcaacgtctgaggt

SEQ ID NO: 1731 - DNA, 25 bp, Artificial Sequence
  Synthetic Oligonucleotide
cttgcagccttgcgtaacgcaagtg

SEQ ID NO: 1732 - DNA, 25 bp, Artificial Sequence
  Synthetic Oligonucleotide
tctctgaggcttacggaagactggg

SEQ ID NO: 1733 - DNA, 25 bp, Artificial Sequence
  Synthetic Oligonucleotide
aattaacggttgtcgaaaactggtg

SEQ ID NO: 1734 - DNA, 25 bp, Artificial Sequence
  Synthetic Oligonucleotide
catcgtaaagactctacaaaaagga

SEQ ID NO: 1735 - DNA, 25 bp, Artificial Sequence
  Synthetic Oligonucleotide
gtagtcaaggcttcaggagggactt

SEQ ID NO: 1736 - DNA, 25 bp, Artificial Sequence
  Synthetic Oligonucleotide
acctcataggcttgagcaatagcat

SEQ ID NO: 1737 - DNA, 25 bp, Artificial Sequence
  Synthetic Oligonucleotide
cattaagagtcagagcaacgagata

SEQ ID NO: 1738 - DNA, 25 bp, Artificial Sequence
  Synthetic Oligonucleotide
atgtgtatggtcttggcaatagtta

SEQ ID NO: 1739 - DNA, 25 bp, Artificial Sequence
  Synthetic Oligonucleotide
ggttgttttatcttggcgccaggat

SEQ ID NO: 1740 - DNA, 25 bp, Artificial Sequence
  Synthetic Oligonucleotide
ggctcggtccgacttggcccatata

SEQ ID NO: 1741 - DNA, 25 bp, Artificial Sequence
  Synthetic Oligonucleotide
gtgcagatccatataagttatcaaa

SEQ ID NO: 1742 - DNA, 25 bp, Artificial Sequence
  Synthetic Oligonucleotide
cttggcccatatactgttaccaaga

SEQ ID NO: 1743 - DNA, 25 bp, Artificial Sequence
  Synthetic Oligonucleotide
ttaatgtcccggagctttctcagga

SEQ ID NO: 1744 - DNA, 25 bp, Artificial Sequence
  Synthetic Oligonucleotide
acaggagaagtgagacctttcatca

SEQ ID NO: 1745 - DNA, 25 bp, Artificial Sequence
  Synthetic Oligonucleotide
tctaggtgtaaacaaccttccatca

SEQ ID NO: 1746 - DNA, 25 bp, Artificial Sequence
  Synthetic Oligonucleotide
ataggtgacaaaaaccttgtcagaa

SEQ ID NO: 1747 - DNA, 25 bp, Artificial Sequence
  Synthetic Oligonucleotide
gacggaagcgtcggagtatcagata

SEQ ID NO: 1748 - DNA, 25 bp, Artificial Sequence
  Synthetic Oligonucleotide
attaagaggagtcaagtatcatata

SEQ ID NO: 1749 - DNA, 25 bp, Artificial Sequence
  Synthetic Oligonucleotide
agttcttcgcgctaaagtatcttta

SEQ ID NO: 1750 - DNA, 25 bp, Artificial Sequence
  Synthetic Oligonucleotide
aagtcccagattacatcgattatga

SEQ ID NO: 1751 - DNA, 25 bp, Artificial Sequence
  Synthetic Oligonucleotide
tactcacgcaatgttatcaatcctg

SEQ ID NO: 1752 - DNA, 25 bp, Artificial Sequence
  Synthetic Oligonucleotide
acttccgatctcaaacctaatcttg

SEQ ID NO: 1753 - DNA, 25 bp, Artificial Sequence
  Synthetic Oligonucleotide
acttgaacttaaagcttatcttgtg

SEQ ID NO: 1754 - DNA, 25 bp, Artificial Sequence
  Synthetic Oligonucleotide
catgtgttactttgccctgtgctgg

SEQ ID NO: 1755 - DNA, 25 bp, Artificial Sequence
  Synthetic Oligonucleotide
gccggctgttatcttcctttttgac

SEQ ID NO: 1756 - DNA, 25 bp, Artificial Sequence
  Synthetic Oligonucleotide
cttctatgtttgctattgtgacgta

SEQ ID NO: 1757 - DNA, 25 bp, Artificial Sequence
  Synthetic Oligonucleotide
acttttgaactacacttactcacgc

SEQ ID NO: 1758 - DNA, 25 bp, Artificial Sequence
  Synthetic Oligonucleotide
gctcttatgataatgtccttagccc

SEQ ID NO: 1759 - DNA, 25 bp, Artificial Sequence
  Synthetic Oligonucleotide
gtttttagacgtatggtggtgcctc

SEQ ID NO: 1760 - DNA, 25 bp, Artificial Sequence
  Synthetic Oligonucleotide
gtttctagacgtatggtggtgcttc

SEQ ID NO: 1761 - DNA, 25 bp, Artificial Sequence
  Synthetic Oligonucleotide
tgtttcgaccgttgtggggccgaca

SEQ ID NO: 1762 - DNA, 25 bp, Artificial Sequence
  Synthetic Oligonucleotide
aagagcagccgtttggacagcggca

SEQ ID NO: 1763 - DNA, 25 bp, Artificial Sequence
  Synthetic Oligonucleotide
gggtagccagtactggacctcagca

SEQ ID NO: 1764 - DNA, 25 bp, Artificial Sequence
  Synthetic Oligonucleotide
tgtgccttccggtacggtcactcga

SEQ ID NO: 1765 - DNA, 25 bp, Artificial Sequence
  Synthetic Oligonucleotide
tgtgccttccggtacggtcactcga

SEQ ID NO: 1766 - DNA, 25 bp, Artificial Sequence
  Synthetic Oligonucleotide
agaagagtgctaaccggaaccccaa

SEQ ID NO: 1767 - DNA, 25 bp, Artificial Sequence
  Synthetic Oligonucleotide
gaacccggctagtgggacagctaaa

SEQ ID NO: 1768 - DNA, 25 bp, Artificial Sequence
  Synthetic Oligonucleotide
tgctccggtgtctcggcaagggcac

SEQ ID NO: 1769 - DNA, 25 bp, Artificial Sequence
  Synthetic Oligonucleotide
ttctgtcctttcacccaggattccg

SEQ ID NO: 1770 - DNA, 25 bp, Artificial Sequence
  Synthetic Oligonucleotide
tctagcttgcagcgtcagcgattgc

SEQ ID NO: 1771 - DNA, 25 bp, Artificial Sequence
  Synthetic Oligonucleotide
ttaacttgaagggtcttcagaactc

SEQ ID NO: 1772 - DNA, 25 bp, Artificial Sequence
  Synthetic Oligonucleotide
tgacttacatgctttagtcacggaa

SEQ ID NO: 1773 - DNA, 25 bp, Artificial Sequence
  Synthetic Oligonucleotide
gtccatacgagtcttttgcggaccg

SEQ ID NO: 1774 - DNA, 25 bp, Artificial Sequence
  Synthetic Oligonucleotide
tgtctaggcaataatgttgcggtcc

SEQ ID NO: 1775 - DNA, 25 bp, Artificial Sequence
  Synthetic Oligonucleotide
tctatccggccaacttttgaaacag

SEQ ID NO: 1776 - DNA, 25 bp, Artificial Sequence
  Synthetic Oligonucleotide
cacctcgcgggctcctttggagtca

SEQ ID NO: 1777 - DNA, 25 bp, Artificial Sequence
  Synthetic Oligonucleotide
gaggtcgctggcaactttttgcttg

SEQ ID NO: 1778 - DNA, 25 bp, Artificial Sequence
  Synthetic Oligonucleotide
ggctgtagcttcctagtttttcgtt

SEQ ID NO: 1779 - DNA, 25 bp, Artificial Sequence
  Synthetic Oligonucleotide
aggcagcgccgctgaatcggttgct

SEQ ID NO: 1780 - DNA, 25 bp, Artificial Sequence
  Synthetic Oligonucleotide
ggcggacttcttcgactctattgcg

SEQ ID NO: 1781 - DNA, 25 bp, Artificial Sequence
  Synthetic Oligonucleotide
cgtaaacgtcgagggacttatcagg

SEQ ID NO: 1782 - DNA, 25 bp, Artificial Sequence
  Synthetic Oligonucleotide
cggctgtctaagactactgtcactg

SEQ ID NO: 1783 - DNA, 25 bp, Artificial Sequence
  Synthetic Oligonucleotide
ctgaggtcggaattttagcacgtag

SEQ ID NO: 1784 - DNA, 25 bp, Artificial Sequence
  Synthetic Oligonucleotide
acttcggacgaaattcgtgagatta

SEQ ID NO: 1785 - DNA, 25 bp, Artificial Sequence
  Synthetic Oligonucleotide
taccctgagaaggatccgtggatta

SEQ ID NO: 1786 - DNA, 25 bp, Artificial Sequence
  Synthetic Oligonucleotide
actcccaaaaccacagtaggacctg

SEQ ID NO: 1787 - DNA, 25 bp, Artificial Sequence
  Synthetic Oligonucleotide
tgctaaagaagcttaagtaggcgcc

SEQ ID NO: 1788 - DNA, 25 bp, Artificial Sequence
  Synthetic Oligonucleotide
ttcaggaatgcctatagttacagcg

SEQ ID NO: 1789 - DNA, 25 bp, Artificial Sequence
  Synthetic Oligonucleotide
gaaccgaaagtgcaatagttaccac

SEQ ID NO: 1790 - DNA, 25 bp, Artificial Sequence
  Synthetic Oligonucleotide
cggacaaaacgtgcaagtggccgta

SEQ ID NO: 1791 - DNA, 25 bp, Artificial Sequence
  Synthetic Oligonucleotide
tcttaggtataggtccaaggcctta

SEQ ID NO: 1792 - DNA, 25 bp, Artificial Sequence
  Synthetic Oligonucleotide
ctcggtaagcgtcaaagtgacatgg

SEQ ID NO: 1793 - DNA, 25 bp, Artificial Sequence
  Synthetic Oligonucleotide
tcgccgcacggaaagtggaagtggt

SEQ ID NO: 1794 - DNA, 25 bp, Artificial Sequence
  Synthetic Oligonucleotide
ttcgtccccgaaccataagaatgtt

SEQ ID NO: 1795 - DNA, 25 bp, Artificial Sequence
  Synthetic Oligonucleotide
gtcgcctaccatcgaagcgccgtta

SEQ ID NO: 1796 - DNA, 25 bp, Artificial Sequence
  Synthetic Oligonucleotide
tatacgccaccttggcaagaggtta

SEQ ID NO: 1797 - DNA, 25 bp, Artificial Sequence
  Synthetic Oligonucleotide
ttggcacccagacgtacatgggttg

SEQ ID NO: 1798 - DNA, 25 bp, Artificial Sequence
  Synthetic Oligonucleotide
ttgggaaaccacatagggcggttgt

SEQ ID NO: 1799 - DNA, 25 bp, Artificial Sequence
  Synthetic Oligonucleotide
aggacttgccatcgtagaactgctg

SEQ ID NO: 1800 - DNA, 25 bp, Artificial Sequence
  Synthetic Oligonucleotide
cagcagttctacgatggcaagtcct

SEQ ID NO: 1801 - DNA, 25 bp, Artificial Sequence
  Synthetic Oligonucleotide
ggggactcggacacctgttccacct

SEQ ID NO: 1802 - DNA, 25 bp, Artificial Sequence
  Synthetic Oligonucleotide
gcgtccaagtggttgcctttggaac

SEQ ID NO: 1803 - DNA, 25 bp, Artificial Sequence
  Synthetic Oligonucleotide
ggtccaatggggtccgtctgcatac

SEQ ID NO: 1804 - DNA, 25 bp, Artificial Sequence
  Synthetic Oligonucleotide
gcgcctacagggacattgggtccta

SEQ ID NO: 1805 - DNA, 25 bp, Artificial Sequence
  Synthetic Oligonucleotide
gggcaatgggcatcgttggtaccat

SEQ ID NO: 1806 - DNA, 25 bp, Artificial Sequence
  Synthetic Oligonucleotide
ttcaattaagtgtaactgagtccta

SEQ ID NO: 1807 - DNA, 25 bp, Artificial Sequence
  Synthetic Oligonucleotide
acatcaaagtacgtacggtgtccta

SEQ ID NO: 1808 - DNA, 25 bp, Artificial Sequence
  Synthetic Oligonucleotide
tcgagcacgattcgtcgcagacctg

SEQ ID NO: 1809 - DNA, 25 bp, Artificial Sequence
  Synthetic Oligonucleotide
acgaacggcagcacggtccaccatg

SEQ ID NO: 1810 - DNA, 25 bp, Artificial Sequence
  Synthetic Oligonucleotide
cgacaggaggactcgggagccccca

SEQ ID NO: 1811 - DNA, 25 bp, Artificial Sequence
  Synthetic Oligonucleotide
cctgcagccttggagagcccgtcaa

SEQ ID NO: 1812 - DNA, 25 bp, Artificial Sequence
  Synthetic Oligonucleotide
ttgacgggctctccaaggctgcagg

SEQ ID NO: 1813 - DNA, 25 bp, Artificial Sequence
  Synthetic Oligonucleotide
tccagggcctcctagaggtccagta

SEQ ID NO: 1814 - DNA, 25 bp, Artificial Sequence
  Synthetic Oligonucleotide
ggttaaggcccctctattcgacaat

SEQ ID NO: 1815 - DNA, 25 bp, Artificial Sequence
  Synthetic Oligonucleotide
agtttttaaccccgacttttaggta

SEQ ID NO: 1816 - DNA, 25 bp, Artificial Sequence
  Synthetic Oligonucleotide
tttccttaacgacgaatagttttgc

SEQ ID NO: 1817 - DNA, 25 bp, Artificial Sequence
  Synthetic Oligonucleotide
tatattcttgagctggccattatgc

SEQ ID NO: 1818 - DNA, 25 bp, Artificial Sequence
  Synthetic Oligonucleotide
cagtttagagatcgccggtttagct

SEQ ID NO: 1819 - DNA, 25 bp, Artificial Sequence
  Synthetic Oligonucleotide
tctctagattcccgcagtggacgcg

SEQ ID NO: 1820 - DNA, 25 bp, Artificial Sequence
  Synthetic Oligonucleotide
gtggtttcgatttcccctgaggctc

SEQ ID NO: 1821 - DNA, 25 bp, Artificial Sequence
  Synthetic Oligonucleotide
gtaggtttcctttcctccaagaaag

SEQ ID NO: 1822 - DNA, 25 bp, Artificial Sequence
  Synthetic Oligonucleotide
gaagagtggcttgtcttcccagaag

SEQ ID NO: 1823 - DNA, 25 bp, Artificial Sequence
  Synthetic Oligonucleotide
ggaacggcttttcctgcacgaacgg

SEQ ID NO: 1824 - DNA, 25 bp, Artificial Sequence
  Synthetic Oligonucleotide
cgaaacaactttatctgaagacttg

SEQ ID NO: 1825 - DNA, 25 bp, Artificial Sequence
  Synthetic Oligonucleotide
gagcaccaactgtggctgctgcttg

SEQ ID NO: 1826 - DNA, 25 bp, Artificial Sequence
  Synthetic Oligonucleotide
ctgctgccacattggcagctgctgg

SEQ ID NO: 1827 - DNA, 25 bp, Artificial Sequence
  Synthetic Oligonucleotide
tacgggcccatgaaccaccacgggg

SEQ ID NO: 1828 - DNA, 25 bp, Artificial Sequence
  Synthetic Oligonucleotide
tacgggcccatgaaccaccacgggg

SEQ ID NO: 1829 - DNA, 25 bp, Artificial Sequence
  Synthetic Oligonucleotide
gaagggcaactagtgttcaaagggc

SEQ ID NO: 1830 - DNA, 25 bp, Artificial Sequence
  Synthetic Oligonucleotide
ttagaaccctcttttgtcaagggga

SEQ ID NO: 1831 - DNA, 25 bp, Artificial Sequence
  Synthetic Oligonucleotide
tgttcagatcttaggtctgatggga

SEQ ID NO: 1832 - DNA, 25 bp, Artificial Sequence
  Synthetic Oligonucleotide
tgactgacctccaggcttgggtgag

SEQ ID NO: 1833 - DNA, 25 bp, Artificial Sequence
  Synthetic Oligonucleotide
tgccacataggctgctgctggaacg

SEQ ID NO: 1834 - DNA, 25 bp, Artificial Sequence
  Synthetic Oligonucleotide
gatcaataggcgtcgtgtgtgaatc

SEQ ID NO: 1835 - DNA, 25 bp, Artificial Sequence
  Synthetic Oligonucleotide
gaaattgaagggtgtctagtgagaa

SEQ ID NO: 1836 - DNA, 25 bp, Artificial Sequence
  Synthetic Oligonucleotide
ctagaaaaaggtattctatagctca

SEQ ID NO: 1837 - DNA, 25 bp, Artificial Sequence
  Synthetic Oligonucleotide
taagtgaaattgtacttcatgtcca

SEQ ID NO: 1838 - DNA, 25 bp, Artificial Sequence
  Synthetic Oligonucleotide
taaacaagtttctttatcatggccg

SEQ ID NO: 1839 - DNA, 25 bp, Artificial Sequence
  Synthetic Oligonucleotide
ttaaatgtcaacttttacgtttggc

SEQ ID NO: 1840 - DNA, 25 bp, Artificial Sequence
  Synthetic Oligonucleotide
ttaagaacaaactgtttgttctgcc

SEQ ID NO: 1841 - DNA, 25 bp, Artificial Sequence
  Synthetic Oligonucleotide
aaagaaagaccagctcgatgttgga

SEQ ID NO: 1842 - DNA, 25 bp, Artificial Sequence
  Synthetic Oligonucleotide
agtggaagatcaccttatgatcata

SEQ ID NO: 1843 - DNA, 25 bp, Artificial Sequence
  Synthetic Oligonucleotide
ggaaggtgctaccgtttcaacagta

SEQ ID NO: 1844 - DNA, 25 bp, Artificial Sequence
  Synthetic Oligonucleotide
actctctcctcccgagtctaacata

SEQ ID NO: 1845 - DNA, 25 bp, Artificial Sequence
  Synthetic Oligonucleotide
actctaccgcctatgactcatacta

SEQ ID NO: 1846 - DNA, 25 bp, Artificial Sequence
  Synthetic Oligonucleotide
cacgacactccgaacgacctccata

SEQ ID NO: 1847 - DNA, 25 bp, Artificial Sequence
  Synthetic Oligonucleotide
tcacgactgcgttgaacggcgacta

SEQ ID NO: 1848 - DNA, 25 bp, Artificial Sequence
  Synthetic Oligonucleotide
gggaacatcaccacgccgaagggcc

SEQ ID NO: 1849 - DNA, 25 bp, Artificial Sequence
  Synthetic Oligonucleotide
aggcactgcaattgcggaagggctt

SEQ ID NO: 1850 - DNA, 25 bp, Artificial Sequence
  Synthetic Oligonucleotide
actacgagaaatgcgaaaggtcctt

SEQ ID NO: 1851 - DNA, 25 bp, Artificial Sequence
  Synthetic Oligonucleotide
cctagaagtactgcatcaggcagtc

SEQ ID NO: 1852 - DNA, 25 bp, Artificial Sequence
  Synthetic Oligonucleotide
gagccaatgtacgaagaattacaac

SEQ ID NO: 1853 - DNA, 25 bp, Artificial Sequence
  Synthetic Oligonucleotide
tgccaaggaccattggacttcgaat

SEQ ID NO: 1854 - DNA, 25 bp, Artificial Sequence
  Synthetic Oligonucleotide
gtcgcgcagcgaaaacgcatttgga

SEQ ID NO: 1855 - DNA, 25 bp, Artificial Sequence
  Synthetic Oligonucleotide
gcgaaagcgaaaggcgcggctgagg

SEQ ID NO: 1856 - DNA, 25 bp, Artificial Sequence
  Synthetic Oligonucleotide
agtacctcagctgaacgtctgaggt

SEQ ID NO: 1857 - DNA, 25 bp, Artificial Sequence
  Synthetic Oligonucleotide
cttgcagccttgggtaacgcaagtg

SEQ ID NO: 1858 - DNA, 25 bp, Artificial Sequence
  Synthetic Oligonucleotide
tctctgaggctttcggaagactggg

SEQ ID NO: 1859 - DNA, 25 bp, Artificial Sequence
  Synthetic Oligonucleotide
aattaacggttgacgaaaactggtg

SEQ ID NO: 1860 - DNA, 25 bp, Artificial Sequence
  Synthetic Oligonucleotide
catcgtaaagacactacaaaaagga

SEQ ID NO: 1861 - DNA, 25 bp, Artificial Sequence
  Synthetic Oligonucleotide
gtagtcaaggctacaggagggactt

SEQ ID NO: 1862 - DNA, 25 bp, Artificial Sequence
  Synthetic Oligonucleotide
acctcataggctagagcaatagcat

SEQ ID NO: 1863 - DNA, 25 bp, Artificial Sequence
  Synthetic Oligonucleotide
cattaagagtcacagcaacgagata

SEQ ID NO: 1864 - DNA, 25 bp, Artificial Sequence
  Synthetic Oligonucleotide
atgtgtatggtcatggcaatagtta

SEQ ID NO: 1865 - DNA, 25 bp, Artificial Sequence
  Synthetic Oligonucleotide
ggttgttttatcatggcgccaggat

SEQ ID NO: 1866 - DNA, 25 bp, Artificial Sequence
  Synthetic Oligonucleotide
ggctcggtccgagttggcccatata

SEQ ID NO: 1867 - DNA, 25 bp, Artificial Sequence
  Synthetic Oligonucleotide
gtgcagatccatttaagttatcaaa

SEQ ID NO: 1868 - DNA, 25 bp, Artificial Sequence
  Synthetic Oligonucleotide
cttggcccatattctgttaccaaga

SEQ ID NO: 1869 - DNA, 25 bp, Artificial Sequence
  Synthetic Oligonucleotide
ttaatgtcccggtgctttctcagga

SEQ ID NO: 1870 - DNA, 25 bp, Artificial Sequence
  Synthetic Oligonucleotide
acaggagaagtgtgacctttcatca

SEQ ID NO: 1871 - DNA, 25 bp, Artificial Sequence
  Synthetic Oligonucleotide
tctaggtgtaaagaaccttccatca

SEQ ID NO: 1872 - DNA, 25 bp, Artificial Sequence
  Synthetic Oligonucleotide
ataggtgacaaataccttgtcagaa

SEQ ID NO: 1873 - DNA, 25 bp, Artificial Sequence
  Synthetic Oligonucleotide
gacggaagcgtccgagtatcagata

SEQ ID NO: 1874 - DNA, 25 bp, Artificial Sequence
  Synthetic Oligonucleotide
attaagaggagtgaagtatcatata

SEQ ID NO: 1875 - DNA, 25 bp, Artificial Sequence
  Synthetic Oligonucleotide
agttcttcgcgcaaaagtatcttta

SEQ ID NO: 1876 - DNA, 25 bp, Artificial Sequence
  Synthetic Oligonucleotide
aagtcccagatttcatcgattatga

SEQ ID NO: 1877 - DNA, 25 bp, Artificial Sequence
  Synthetic Oligonucleotide
tactcacgcaatcttatcaatcctg

SEQ ID NO: 1878 - DNA, 25 bp, Artificial Sequence
  Synthetic Oligonucleotide
acttccgatctctaacctaatcttg

SEQ ID NO: 1879 - DNA, 25 bp, Artificial Sequence
  Synthetic Oligonucleotide
acttgaacttaatgcttatcttgtg

SEQ ID NO: 1880 - DNA, 25 bp, Artificial Sequence
  Synthetic Oligonucleotide
catgtgttacttagccctgtgctgg

SEQ ID NO: 1881 - DNA, 25 bp, Artificial Sequence
  Synthetic Oligonucleotide
gccggctgttatgttcctttttgac

SEQ ID NO: 1882 - DNA, 25 bp, Artificial Sequence
  Synthetic Oligonucleotide
cttctatgtttggtattgtgacgta

SEQ ID NO: 1883 - DNA, 25 bp, Artificial Sequence
  Synthetic Oligonucleotide
acttttgaactagacttactcacgc

SEQ ID NO: 1884 - DNA, 25 bp, Artificial Sequence
  Synthetic Oligonucleotide
gctcttatgatattgtccttagccc

SEQ ID NO: 1885 - DNA, 25 bp, Artificial Sequence
  Synthetic Oligonucleotide
gtttttagacgtttggtggtgcctc

SEQ ID NO: 1886 - DNA, 25 bp, Artificial Sequence
  Synthetic Oligonucleotide
gtttctagacgtttggtggtgcttc

SEQ ID NO: 1887 - DNA, 25 bp, Artificial Sequence
  Synthetic Oligonucleotide
tgtttcgaccgtagtggggccgaca

SEQ ID NO: 1888 - DNA, 25 bp, Artificial Sequence
  Synthetic Oligonucleotide
aagagcagccgtatggacagcggca

SEQ ID NO: 1889 - DNA, 25 bp, Artificial Sequence
  Synthetic Oligonucleotide
gggtagccagtagtggacctcagca

SEQ ID NO: 1890 - DNA, 25 bp, Artificial Sequence
  Synthetic Oligonucleotide
tgtgccttccggaacggtcactcga

SEQ ID NO: 1891 - DNA, 25 bp, Artificial Sequence
  Synthetic Oligonucleotide
tgtgccttccggaacggtcactcga

SEQ ID NO: 1892 - DNA, 25 bp, Artificial Sequence
  Synthetic Oligonucleotide
agaagagtgctatccggaaccccaa

SEQ ID NO: 1893 - DNA, 25 bp, Artificial Sequence
  Synthetic Oligonucleotide
gaacccggctagagggacagctaaa

SEQ ID NO: 1894 - DNA, 25 bp, Artificial Sequence
  Synthetic Oligonucleotide
tgctccggtgtcacggcaagggcac

SEQ ID NO: 1895 - DNA, 25 bp, Artificial Sequence
  Synthetic Oligonucleotide
ttctgtcctttctcccaggattccg

SEQ ID NO: 1896 - DNA, 25 bp, Artificial Sequence
  Synthetic Oligonucleotide
tctagcttgcagggtcagcgattgc

SEQ ID NO: 1897 - DNA, 25 bp, Artificial Sequence
  Synthetic Oligonucleotide
ttaacttgaaggctcttcagaactc

SEQ ID NO: 1898 - DNA, 25 bp, Artificial Sequence
  Synthetic Oligonucleotide
tgacttacatgcattagtcacggaa

SEQ ID NO: 1899 - DNA, 25 bp, Artificial Sequence
  Synthetic Oligonucleotide
gtccatacgagtgttttgcggaccg

SEQ ID NO: 1900 - DNA, 25 bp, Artificial Sequence
  Synthetic Oligonucleotide
tgtctaggcaattatgttgcggtcc

SEQ ID NO: 1901 - DNA, 25 bp, Artificial Sequence
  Synthetic Oligonucleotide
tctatccggccatcttttgaaacag

SEQ ID NO: 1902 - DNA, 25 bp, Artificial Sequence
  Synthetic Oligonucleotide
cacctcgcgggcacctttggagtca

SEQ ID NO: 1903 - DNA, 25 bp, Artificial Sequence
  Synthetic Oligonucleotide
gaggtcgctggctactttttgcttg

SEQ ID NO: 1904 - DNA, 25 bp, Artificial Sequence
  Synthetic Oligonucleotide
ggctgtagcttcgtagtttttcgtt

SEQ ID NO: 1905 - DNA, 25 bp, Artificial Sequence
  Synthetic Oligonucleotide
aggcagcgccgcagaatcggttgct

SEQ ID NO: 1906 - DNA, 25 bp, Artificial Sequence
  Synthetic Oligonucleotide
ggcggacttcttggactctattgcg

SEQ ID NO: 1907 - DNA, 25 bp, Artificial Sequence
  Synthetic Oligonucleotide
cgtaaacgtcgacggacttatcagg

SEQ ID NO: 1908 - DNA, 25 bp, Artificial Sequence
  Synthetic Oligonucleotide
cggctgtctaagtctactgtcactg

SEQ ID NO: 1909 - DNA, 25 bp, Artificial Sequence
  Synthetic Oligonucleotide
ctgaggtcggaaatttagcacgtag

SEQ ID NO: 1910 - DNA, 25 bp, Artificial Sequence
  Synthetic Oligonucleotide
acttcggacgaatttcgtgagatta

SEQ ID NO: 1911 - DNA, 25 bp, Artificial Sequence
  Synthetic Oligonucleotide
taccctgagaagcatccgtggatta

SEQ ID NO: 1912 - DNA, 25 bp, Artificial Sequence
  Synthetic Oligonucleotide
actcccaaaacctcagtaggacctg

SEQ ID NO: 1913 - DNA, 25 bp, Artificial Sequence
  Synthetic Oligonucleotide
tgctaaagaagcataagtaggcgcc

SEQ ID NO: 1914 - DNA, 25 bp, Artificial Sequence
  Synthetic Oligonucleotide
ttcaggaatgccaatagttacagcg

SEQ ID NO: 1915 - DNA, 25 bp, Artificial Sequence
  Synthetic Oligonucleotide
gaaccgaaagtggaatagttaccac

SEQ ID NO: 1916 - DNA, 25 bp, Artificial Sequence
  Synthetic Oligonucleotide
cggacaaaacgtccaagtggccgta

SEQ ID NO: 1917 - DNA, 25 bp, Artificial Sequence
  Synthetic Oligonucleotide
tcttaggtatagctccaaggcctta

SEQ ID NO: 1918 - DNA, 25 bp, Artificial Sequence
  Synthetic Oligonucleotide
ctcggtaagcgtgaaagtgacatgg

SEQ ID NO: 1919 - DNA, 25 bp, Artificial Sequence
  Synthetic Oligonucleotide
tcgccgcacggatagtggaagtggt

SEQ ID NO: 1920 - DNA, 25 bp, Artificial Sequence
  Synthetic Oligonucleotide
ttcgtccccgaagcataagaatgtt

SEQ ID NO: 1921 - DNA, 25 bp, Artificial Sequence
  Synthetic Oligonucleotide
gtcgcctaccatggaagcgccgtta

SEQ ID NO: 1922 - DNA, 25 bp, Artificial Sequence
  Synthetic Oligonucleotide
tatacgccacctaggcaagaggtta

SEQ ID NO: 1923 - DNA, 25 bp, Artificial Sequence
  Synthetic Oligonucleotide
ttggcacccagaggtacatgggttg

SEQ ID NO: 1924 - DNA, 25 bp, Artificial Sequence
  Synthetic Oligonucleotide
ttgggaaaccacttagggcggttgt

SEQ ID NO: 1925 - DNA, 25 bp, Artificial Sequence
  Synthetic Oligonucleotide
cagcagttctacgatggcaagtcct

SEQ ID NO: 1926 - DNA, 25 bp, Artificial Sequence
  Synthetic Oligonucleotide
aggacttgccatcgtagaactgctg

SEQ ID NO: 1927 - DNA, 25 bp, Artificial Sequence
  Synthetic Oligonucleotide
attgactgcgactccgagctttcgc

SEQ ID NO: 1928 - DNA, 25 bp, Artificial Sequence
  Synthetic Oligonucleotide
aattagtaatgctaccaggatcttt

SEQ ID NO: 1929 - DNA, 25 bp, Artificial Sequence
  Synthetic Oligonucleotide
ggcctgtattgctacaatggcatat

SEQ ID NO: 1930 - DNA, 25 bp, Artificial Sequence
  Synthetic Oligonucleotide
ctcgcgctttggcccaatgcacgaa

SEQ ID NO: 1931 - DNA, 25 bp, Artificial Sequence
  Synthetic Oligonucleotide
cgcgggtcatggtcaaatcatcgaa

SEQ ID NO: 1932 - DNA, 25 bp, Artificial Sequence
  Synthetic Oligonucleotide
tgacgtagactatgaccgttcgaac

SEQ ID NO: 1933 - DNA, 25 bp, Artificial Sequence
  Synthetic Oligonucleotide
aacgtataaaagatgaccggtcgaa

SEQ ID NO: 1934 - DNA, 25 bp, Artificial Sequence
  Synthetic Oligonucleotide
atggttactaagatagccagacggg

SEQ ID NO: 1935 - DNA, 25 bp, Artificial Sequence
  Synthetic Oligonucleotide
ctatggttagaagctgtaccaattg

SEQ ID NO: 1936 - DNA, 25 bp, Artificial Sequence
  Synthetic Oligonucleotide
tcggtatttaaagcacacctaatga

SEQ ID NO: 1937 - DNA, 25 bp, Artificial Sequence
  Synthetic Oligonucleotide
ccagtcctagaagtactccatcaga

SEQ ID NO: 1938 - DNA, 25 bp, Artificial Sequence
  Synthetic Oligonucleotide
gcggggccagcacctatttgccgag

SEQ ID NO: 1939 - DNA, 25 bp, Artificial Sequence
  Synthetic Oligonucleotide
ggtcccgtctcctggttgtacccgt

SEQ ID NO: 1940 - DNA, 25 bp, Artificial Sequence
  Synthetic Oligonucleotide
agcaggtgccttactctggtagccc

SEQ ID NO: 1941 - DNA, 25 bp, Artificial Sequence
  Synthetic Oligonucleotide
aggctgttacctacccttgtgccgc

SEQ ID NO: 1942 - DNA, 25 bp, Artificial Sequence
  Synthetic Oligonucleotide
ggggttattaaacctatatttcgtc

SEQ ID NO: 1943 - DNA, 25 bp, Artificial Sequence
  Synthetic Oligonucleotide
cggagggtttcacgaccctaatgtc

SEQ ID NO: 1944 - DNA, 25 bp, Artificial Sequence
  Synthetic Oligonucleotide
cggagggctcatcgaccctaatgtc

SEQ ID NO: 1945 - DNA, 25 bp, Artificial Sequence
  Synthetic Oligonucleotide
ggagtcctgcatacgccataatcgc

SEQ ID NO: 1946 - DNA, 25 bp, Artificial Sequence
  Synthetic Oligonucleotide
ggcggtcccgcgtgtcccaaagcta

SEQ ID NO: 1947 - DNA, 25 bp, Artificial Sequence
  Synthetic Oligonucleotide
agtcttccgttgttccctaaagaca

SEQ ID NO: 1948 - DNA, 25 bp, Artificial Sequence
  Synthetic Oligonucleotide
cagtcttccgttgttccctaaagac

SEQ ID NO: 1949 - DNA, 25 bp, Artificial Sequence
  Synthetic Oligonucleotide
cgcgctgcaaacgcccgtcataaac

SEQ ID NO: 1950 - DNA, 25 bp, Artificial Sequence
  Synthetic Oligonucleotide
gtcgctttcaagagccggcagaacc

SEQ ID NO: 1951 - DNA, 25 bp, Artificial Sequence
  Synthetic Oligonucleotide
agttacctgaagagcgctgcagccc

SEQ ID NO: 1952 - DNA, 25 bp, Artificial Sequence
  Synthetic Oligonucleotide
agttacctgaagagcgctgcagccc

SEQ ID NO: 1953 - DNA, 25 bp, Artificial Sequence
  Synthetic Oligonucleotide
agttacctgaagagcgctgcagccc

SEQ ID NO: 1954 - DNA, 25 bp, Artificial Sequence
  Synthetic Oligonucleotide
acctcgcagcagaggccgcttaggc

SEQ ID NO: 1955 - DNA, 25 bp, Artificial Sequence
  Synthetic Oligonucleotide
ttcggtcaacaagacgcccttagcc

SEQ ID NO: 1956 - DNA, 25 bp, Artificial Sequence
  Synthetic Oligonucleotide
tcgggtccctacttcaggtttggcc

SEQ ID NO: 1957 - DNA, 25 bp, Artificial Sequence
  Synthetic Oligonucleotide
gtggtgctctcaaacattgtgggct

SEQ ID NO: 1958 - DNA, 25 bp, Artificial Sequence
  Synthetic Oligonucleotide
tgtggcaccactccatatgaggcag

SEQ ID NO: 1959 - DNA, 25 bp, Artificial Sequence
  Synthetic Oligonucleotide
tttgcgaaccccaatataagacgta

SEQ ID NO: 1960 - DNA, 25 bp, Artificial Sequence
  Synthetic Oligonucleotide
attactcggaaaacgccaaagtgaa

SEQ ID NO: 1961 - DNA, 25 bp, Artificial Sequence
  Synthetic Oligonucleotide
attcttgaagattcactacagggga

SEQ ID NO: 1962 - DNA, 25 bp, Artificial Sequence
  Synthetic Oligonucleotide
acctttcaagtgtgacactgccata

SEQ ID NO: 1963 - DNA, 25 bp, Artificial Sequence
  Synthetic Oligonucleotide
gaacccccaatgtctaattcacgga

SEQ ID NO: 1964 - DNA, 25 bp, Artificial Sequence
  Synthetic Oligonucleotide
acccaccataggtctacattggcac

SEQ ID NO: 1965 - DNA, 25 bp, Artificial Sequence
  Synthetic Oligonucleotide
gttcagtcacatgtccattcgggac

SEQ ID NO: 1966 - DNA, 25 bp, Artificial Sequence
  Synthetic Oligonucleotide
gtgtcataccatgtctttgtttctg

SEQ ID NO: 1967 - DNA, 25 bp, Artificial Sequence
  Synthetic Oligonucleotide
ggatgacgaatactttcttatttca

SEQ ID NO: 1968 - DNA, 25 bp, Artificial Sequence
  Synthetic Oligonucleotide
caatgcggtagtcttatcatttaaa

SEQ ID NO: 1969 - DNA, 25 bp, Artificial Sequence
  Synthetic Oligonucleotide
tcgaagtagtggttgcatcctcaga

SEQ ID NO: 1970 - DNA, 25 bp, Artificial Sequence
  Synthetic Oligonucleotide
acagcgtaggcacctataccgagga

SEQ ID NO: 1971 - DNA, 25 bp, Artificial Sequence
  Synthetic Oligonucleotide
gacctcaggagtcaacactcggtga

SEQ ID NO: 1972 - DNA, 25 bp, Artificial Sequence
  Synthetic Oligonucleotide
gcgcccagcgcgggaagtacttcta

SEQ ID NO: 1973 - DNA, 25 bp, Artificial Sequence
  Synthetic Oligonucleotide
ctccacggtcacgtacatctcagta

SEQ ID NO: 1974 - DNA, 25 bp, Artificial Sequence
  Synthetic Oligonucleotide
gatgtactcaacgggaaaacctcaa

SEQ ID NO: 1975 - DNA, 25 bp, Artificial Sequence
  Synthetic Oligonucleotide
gttgtcaaaagacacaccgtcacta

SEQ ID NO: 1976 - DNA, 25 bp, Artificial Sequence
  Synthetic Oligonucleotide
ttccaaggtagaagtaagtctgctc

SEQ ID NO: 1977 - DNA, 25 bp, Artificial Sequence
  Synthetic Oligonucleotide
ttgaagatggaacagtcgtagacgc

SEQ ID NO: 1978 - DNA, 25 bp, Artificial Sequence
  Synthetic Oligonucleotide
atacgtattgtaaacgatctacaac

SEQ ID NO: 1979 - DNA, 25 bp, Artificial Sequence
  Synthetic Oligonucleotide
acccgaccgtctttggaacttcaac

SEQ ID NO: 1980 - DNA, 25 bp, Artificial Sequence
  Synthetic Oligonucleotide
tcaccagtattcagggagttattaa

SEQ ID NO: 1981 - DNA, 25 bp, Artificial Sequence
  Synthetic Oligonucleotide
gcgaacacgcccaggggcagttaag

SEQ ID NO: 1982 - DNA, 25 bp, Artificial Sequence
  Synthetic Oligonucleotide
cgtaaagtggcgatgtgtcctttaa

SEQ ID NO: 1983 - DNA, 25 bp, Artificial Sequence
  Synthetic Oligonucleotide
atttaagtgaatcgtgtcccatata

SEQ ID NO: 1984 - DNA, 25 bp, Artificial Sequence
  Synthetic Oligonucleotide
tgttacggtacaagttaccccatga

SEQ ID NO: 1985 - DNA, 25 bp, Artificial Sequence
  Synthetic Oligonucleotide
ctttcggtccacacatacctagtgg

SEQ ID NO: 1986 - DNA, 25 bp, Artificial Sequence
  Synthetic Oligonucleotide
cacgtgttgaccgctgtcaaaaggg

SEQ ID NO: 1987 - DNA, 25 bp, Artificial Sequence
  Synthetic Oligonucleotide
gtagtatgaaccgtccaaagaggtc

SEQ ID NO: 1988 - DNA, 25 bp, Artificial Sequence
  Synthetic Oligonucleotide
gaacctacaccatcggcaaagagtc

SEQ ID NO: 1989 - DNA, 25 bp, Artificial Sequence
  Synthetic Oligonucleotide
gtaacctaaggagccgacggaaatg

SEQ ID NO: 1990 - DNA, 25 bp, Artificial Sequence
  Synthetic Oligonucleotide
gtagtccaaaacatccggatgactt

SEQ ID NO: 1991 - DNA, 25 bp, Artificial Sequence
  Synthetic Oligonucleotide
aatattacaaaactgtcggaagcct

SEQ ID NO: 1992 - DNA, 25 bp, Artificial Sequence
  Synthetic Oligonucleotide
ttacggttaaattacggtcaaagcc

SEQ ID NO: 1993 - DNA, 25 bp, Artificial Sequence
  Synthetic Oligonucleotide
ttttggtataaacaagttcacaggc

SEQ ID NO: 1994 - DNA, 25 bp, Artificial Sequence
  Synthetic Oligonucleotide
cggtgaaccatctagtccaatagac

SEQ ID NO: 1995 - DNA, 25 bp, Artificial Sequence
  Synthetic Oligonucleotide
ggtcaccttcgaccttactacaaga

SEQ ID NO: 1996 - DNA, 25 bp, Artificial Sequence
  Synthetic Oligonucleotide
cacgctgaccttacgcttctgaaga

SEQ ID NO: 1997 - DNA, 25 bp, Artificial Sequence
  Synthetic Oligonucleotide
agacacttaaatcgtcgtttgggct

SEQ ID NO: 1998 - DNA, 25 bp, Artificial Sequence
  Synthetic Oligonucleotide
tagccttaattggtctgtttagcga

SEQ ID NO: 1999 - DNA, 25 bp, Artificial Sequence
  Synthetic Oligonucleotide
tgccttagagagacggggttaacac

SEQ ID NO: 2000 - DNA, 25 bp, Artificial Sequence
  Synthetic Oligonucleotide
ggcagttgcagaagtgcttctaaac

SEQ ID NO: 2001 - DNA, 25 bp, Artificial Sequence
  Synthetic Oligonucleotide
gcttttgttacgaacttgttcatta

SEQ ID NO: 2002 - DNA, 25 bp, Artificial Sequence
  Synthetic Oligonucleotide
taccttttacggactgttactaaga

SEQ ID NO: 2003 - DNA, 25 bp, Artificial Sequence
  Synthetic Oligonucleotide
atctacgccgaaaggcccttcttgg

SEQ ID NO: 2004 - DNA, 25 bp, Artificial Sequence
  Synthetic Oligonucleotide
atcactacctcagtccctgtcttgg

SEQ ID NO: 2005 - DNA, 25 bp, Artificial Sequence
  Synthetic Oligonucleotide
aaaaaactgtctcgtcccatttgtg

SEQ ID NO: 2006 - DNA, 25 bp, Artificial Sequence
  Synthetic Oligonucleotide
gaaacgagtttttatcaccctttga

SEQ ID NO: 2007 - DNA, 25 bp, Artificial Sequence
  Synthetic Oligonucleotide
gttagggtcctttgtaccattttgg

SEQ ID NO: 2008 - DNA, 25 bp, Artificial Sequence
  Synthetic Oligonucleotide
cagcgactcctttagccatctttgc

SEQ ID NO: 2009 - DNA, 25 bp, Artificial Sequence
  Synthetic Oligonucleotide
agcgactcctttagccatctttgct

SEQ ID NO: 2010 - DNA, 25 bp, Artificial Sequence
  Synthetic Oligonucleotide
ggccccactattcgacaattcttct

SEQ ID NO: 2011 - DNA, 25 bp, Artificial Sequence
  Synthetic Oligonucleotide
gcagcacatgttgacacatattttc

SEQ ID NO: 2012 - DNA, 25 bp, Artificial Sequence
  Synthetic Oligonucleotide
ccttgacatgtttcacagtaattga

SEQ ID NO: 2013 - DNA, 25 bp, Artificial Sequence
  Synthetic Oligonucleotide
ctcctggctaagacccagagcagga

SEQ ID NO: 2014 - DNA, 25 bp, Artificial Sequence
  Synthetic Oligonucleotide
tcctgtctaaggacccaaggcggtg

SEQ ID NO: 2015 - DNA, 25 bp, Artificial Sequence
  Synthetic Oligonucleotide
cggtcgtaacaggcccacaggaaga

SEQ ID NO: 2016 - DNA, 25 bp, Artificial Sequence
  Synthetic Oligonucleotide
gacggaacttcgccttaccagacca

SEQ ID NO: 2017 - DNA, 25 bp, Artificial Sequence
  Synthetic Oligonucleotide
cttgaattcactaaacttagaccta

SEQ ID NO: 2018 - DNA, 25 bp, Artificial Sequence
  Synthetic Oligonucleotide
ttgtgacttgatgacaccccatagt

SEQ ID NO: 2019 - DNA, 25 bp, Artificial Sequence
  Synthetic Oligonucleotide
acttgtgacttgatgacaccccata

SEQ ID NO: 2020 - DNA, 25 bp, Artificial Sequence
  Synthetic Oligonucleotide
actgtcgtcgttttgcgaaccccaa

SEQ ID NO: 2021 - DNA, 25 bp, Artificial Sequence
  Synthetic Oligonucleotide
tgtcgtcgttttgcgaaccccaata

SEQ ID NO: 2022 - DNA, 25 bp, Artificial Sequence
  Synthetic Oligonucleotide
agcgacgttgacgcttgcgcaatta

SEQ ID NO: 2023 - DNA, 25 bp, Artificial Sequence
  Synthetic Oligonucleotide
gactacgttgacatttttctaatga

SEQ ID NO: 2024 - DNA, 25 bp, Artificial Sequence
  Synthetic Oligonucleotide
gcgccttcctaaatttcacctgagt

SEQ ID NO: 2025 - DNA, 25 bp, Artificial Sequence
  Synthetic Oligonucleotide
aggccactctcagaattgcttctag

SEQ ID NO: 2026 - DNA, 25 bp, Artificial Sequence
  Synthetic Oligonucleotide
gatgacaccccatagtttaggttta

SEQ ID NO: 2027 - DNA, 25 bp, Artificial Sequence
  Synthetic Oligonucleotide
aaagaccacctcgatgttggaatta

SEQ ID NO: 2028 - DNA, 25 bp, Artificial Sequence
  Synthetic Oligonucleotide
gagccccgactctacttttggaaga

SEQ ID NO: 2029 - DNA, 25 bp, Artificial Sequence
  Synthetic Oligonucleotide
acgacccaagtctctattgttggaa

SEQ ID NO: 2030 - DNA, 25 bp, Artificial Sequence
  Synthetic Oligonucleotide
cacgtctttgtctcggttttggtta

SEQ ID NO: 2031 - DNA, 25 bp, Artificial Sequence
  Synthetic Oligonucleotide
tcgtcttctgcgagtcttctttata

SEQ ID NO: 2032 - DNA, 25 bp, Artificial Sequence
  Synthetic Oligonucleotide
agcgcctttgcgacggtctggtgca

SEQ ID NO: 2033 - DNA, 25 bp, Artificial Sequence
  Synthetic Oligonucleotide
gtgcctttctgtaaggtcagttgaa

SEQ ID NO: 2034 - DNA, 25 bp, Artificial Sequence
  Synthetic Oligonucleotide
taggcctacttgaaagcacttgaga

SEQ ID NO: 2035 - DNA, 25 bp, Artificial Sequence
  Synthetic Oligonucleotide
gagcgaccgccgaaagtgtttcgga

SEQ ID NO: 2036 - DNA, 25 bp, Artificial Sequence
  Synthetic Oligonucleotide
tgttaaagcaagcactgttgtggac

SEQ ID NO: 2037 - DNA, 25 bp, Artificial Sequence
  Synthetic Oligonucleotide
tttataagccacgatagtgtgatca

SEQ ID NO: 2038 - DNA, 25 bp, Artificial Sequence
  Synthetic Oligonucleotide
gtttgaaacccgtgagtcggagatg

SEQ ID NO: 2039 - DNA, 25 bp, Artificial Sequence
  Synthetic Oligonucleotide
tgttgcatcagtcgaggtcggagcc

SEQ ID NO: 2040 - DNA, 25 bp, Artificial Sequence
  Synthetic Oligonucleotide
ggagaattagtaccggagtcaaggc

SEQ ID NO: 2041 - DNA, 25 bp, Artificial Sequence
  Synthetic Oligonucleotide
gtccgcgggttatgctggtttaggc

SEQ ID NO: 2042 - DNA, 25 bp, Artificial Sequence
  Synthetic Oligonucleotide
catccgcaggaagaccgggtaaggc

SEQ ID NO: 2043 - DNA, 25 bp, Artificial Sequence
  Synthetic Oligonucleotide
atcagccgttcacacgcgggcagga

SEQ ID NO: 2044 - DNA, 25 bp, Artificial Sequence
  Synthetic Oligonucleotide
tcttcagccgtccaccaggcagtga

SEQ ID NO: 2045 - DNA, 25 bp, Artificial Sequence
  Synthetic Oligonucleotide
gttagagcccaccgacttgcggtga

SEQ ID NO: 2046 - DNA, 25 bp, Artificial Sequence
  Synthetic Oligonucleotide
tcataggcttgagcaatagcatggt

SEQ ID NO: 2047 - DNA, 25 bp, Artificial Sequence
  Synthetic Oligonucleotide
gcgcgggtcatggtcaaatcatcga

SEQ ID NO: 2048 - DNA, 25 bp, Artificial Sequence
  Synthetic Oligonucleotide
gaacaggcagtccttcaagcatcct

SEQ ID NO: 2049 - DNA, 25 bp, Artificial Sequence
  Synthetic Oligonucleotide
tcagaaaggccagtctcaaaattgt

SEQ ID NO: 2050 - DNA, 25 bp, Artificial Sequence
  Synthetic Oligonucleotide
cataaggattaacttgaagggtctt

SEQ ID NO: 2051 - DNA, 25 bp, Artificial Sequence
  Synthetic Oligonucleotide
aggacttgccatcgtagaactgctg

SEQ ID NO: 2052 - DNA, 25 bp, Artificial Sequence
  Synthetic Oligonucleotide
cagcagttctacgatggcaagtcct

SEQ ID NO: 2053 - DNA, 25 bp, Artificial Sequence
  Synthetic Oligonucleotide
attgactgcgacaccgagctttcgc

SEQ ID NO: 2054 - DNA, 25 bp, Artificial Sequence
  Synthetic Oligonucleotide
aattagtaatgcaaccaggatcttt

SEQ ID NO: 2055 - DNA, 25 bp, Artificial Sequence
  Synthetic Oligonucleotide
ggcctgtattgcaacaatggcatat

SEQ ID NO: 2056 - DNA, 25 bp, Artificial Sequence
  Synthetic Oligonucleotide
ctcgcgctttgggccaatgcacgaa

SEQ ID NO: 2057 - DNA, 25 bp, Artificial Sequence
  Synthetic Oligonucleotide
cgcgggtcatggacaaatcatcgaa

SEQ ID NO: 2058 - DNA, 25 bp, Artificial Sequence
  Synthetic Oligonucleotide
tgacgtagactaagaccgttcgaac

SEQ ID NO: 2059 - DNA, 25 bp, Artificial Sequence
  Synthetic Oligonucleotide
aacgtataaaagttgaccggtcgaa

SEQ ID NO: 2060 - DNA, 25 bp, Artificial Sequence
  Synthetic Oligonucleotide
atggttactaagttagccagacggg

SEQ ID NO: 2061 - DNA, 25 bp, Artificial Sequence
  Synthetic Oligonucleotide
ctatggttagaacctgtaccaattg

SEQ ID NO: 2062 - DNA, 25 bp, Artificial Sequence
  Synthetic Oligonucleotide
tcggtatttaaaccacacctaatga

SEQ ID NO: 2063 - DNA, 25 bp, Artificial Sequence
  Synthetic Oligonucleotide
ccagtcctagaactactccatcaga

SEQ ID NO: 2064 - DNA, 25 bp, Artificial Sequence
  Synthetic Oligonucleotide
gcggggccagcagctatttgccgag

SEQ ID NO: 2065 - DNA, 25 bp, Artificial Sequence
  Synthetic Oligonucleotide
ggtcccgtctccaggttgtacccgt

SEQ ID NO: 2066 - DNA, 25 bp, Artificial Sequence
  Synthetic Oligonucleotide
agcaggtgcctttctctggtagccc

SEQ ID NO: 2067 - DNA, 25 bp, Artificial Sequence
  Synthetic Oligonucleotide
aggctgttaccttcccttgtgccgc

SEQ ID NO: 2068 - DNA, 25 bp, Artificial Sequence
  Synthetic Oligonucleotide
ggggttattaaagctatatttcgtc

SEQ ID NO: 2069 - DNA, 25 bp, Artificial Sequence
  Synthetic Oligonucleotide
cggagggtttcaggaccctaatgtc

SEQ ID NO: 2070 - DNA, 25 bp, Artificial Sequence
  Synthetic Oligonucleotide
cggagggctcatggaccctaatgtc

SEQ ID NO: 2071 - DNA, 25 bp, Artificial Sequence
  Synthetic Oligonucleotide
ggagtcctgcattcgccataatcgc

SEQ ID NO: 2072 - DNA, 25 bp, Artificial Sequence
  Synthetic Oligonucleotide
ggcggtcccgcgagtcccaaagcta

SEQ ID NO: 2073 - DNA, 25 bp, Artificial Sequence
  Synthetic Oligonucleotide
agtcttccgttgatccctaaagaca

SEQ ID NO: 2074 - DNA, 25 bp, Artificial Sequence
  Synthetic Oligonucleotide
cagtcttccgttcttccctaaagac

SEQ ID NO: 2075 - DNA, 25 bp, Artificial Sequence
  Synthetic Oligonucleotide
cgcgctgcaaacccccgtcataaac

SEQ ID NO: 2076 - DNA, 25 bp, Artificial Sequence
  Synthetic Oligonucleotide
gtcgctttcaagtgccggcagaacc

SEQ ID NO: 2077 - DNA, 25 bp, Artificial Sequence
  Synthetic Oligonucleotide
agttacctgaagtgcgctgcagccc

SEQ ID NO: 2078 - DNA, 25 bp, Artificial Sequence
  Synthetic Oligonucleotide
agttacctgaagtgcgctgcagccc

SEQ ID NO: 2079 - DNA, 25 bp, Artificial Sequence
  Synthetic Oligonucleotide
agttacctgaagtgcgctgcagccc

SEQ ID NO: 2080 - DNA, 25 bp, Artificial Sequence
  Synthetic Oligonucleotide
acctcgcagcagtggccgcttaggc

SEQ ID NO: 2081 - DNA, 25 bp, Artificial Sequence
  Synthetic Oligonucleotide
ttcggtcaacaacacgcccttagcc

SEQ ID NO: 2082 - DNA, 25 bp, Artificial Sequence
  Synthetic Oligonucleotide
tcgggtccctacatcaggtttggcc

SEQ ID NO: 2083 - DNA, 25 bp, Artificial Sequence
  Synthetic Oligonucleotide
gtggtgctctcatacattgtgggct

SEQ ID NO: 2084 - DNA, 25 bp, Artificial Sequence
  Synthetic Oligonucleotide
tgtggcaccactgcatatgaggcag

SEQ ID NO: 2085 - DNA, 25 bp, Artificial Sequence
  Synthetic Oligonucleotide
tttgcgaacccctatataagacgta

SEQ ID NO: 2086 - DNA, 25 bp, Artificial Sequence
  Synthetic Oligonucleotide
attactcggaaatcgccaaagtgaa

SEQ ID NO: 2087 - DNA, 25 bp, Artificial Sequence
  Synthetic Oligonucleotide
attcttgaagatacactacagggga

SEQ ID NO: 2088 - DNA, 25 bp, Artificial Sequence
  Synthetic Oligonucleotide
acctttcaagtgagacactgccata

SEQ ID NO: 2089 - DNA, 25 bp, Artificial Sequence
  Synthetic Oligonucleotide
gaacccccaatgactaattcacgga

SEQ ID NO: 2090 - DNA, 25 bp, Artificial Sequence
  Synthetic Oligonucleotide
acccaccataggactacattggcac

SEQ ID NO: 2091 - DNA, 25 bp, Artificial Sequence
  Synthetic Oligonucleotide
gttcagtcacatctccattcgggac

SEQ ID NO: 2092 - DNA, 25 bp, Artificial Sequence
  Synthetic Oligonucleotide
gtgtcataccatctctttgtttctg

SEQ ID NO: 2093 - DNA, 25 bp, Artificial Sequence
  Synthetic Oligonucleotide
ggatgacgaatagtttcttatttca

SEQ ID NO: 2094 - DNA, 25 bp, Artificial Sequence
  Synthetic Oligonucleotide
caatgcggtagtgttatcatttaaa

SEQ ID NO: 2095 - DNA, 25 bp, Artificial Sequence
  Synthetic Oligonucleotide
tcgaagtagtggatgcatcctcaga

SEQ ID NO: 2096 - DNA, 25 bp, Artificial Sequence
  Synthetic Oligonucleotide
acagcgtaggcagctataccgagga

SEQ ID NO: 2097 - DNA, 25 bp, Artificial Sequence
  Synthetic Oligonucleotide
gacctcaggagtgaacactcggtga

SEQ ID NO: 2098 - DNA, 25 bp, Artificial Sequence
  Synthetic Oligonucleotide
gcgcccagcgcgcgaagtacttcta

SEQ ID NO: 2099 - DNA, 25 bp, Artificial Sequence
  Synthetic Oligonucleotide
ctccacggtcacctacatctcagta

SEQ ID NO: 2100 - DNA, 25 bp, Artificial Sequence
  Synthetic Oligonucleotide
gatgtactcaaccggaaaacctcaa

SEQ ID NO: 2101 - DNA, 25 bp, Artificial Sequence
  Synthetic Oligonucleotide
gttgtcaaaagagacaccgtcacta

SEQ ID NO: 2102 - DNA, 25 bp, Artificial Sequence
  Synthetic Oligonucleotide
ttccaaggtagatgtaagtctgctc

SEQ ID NO: 2103 - DNA, 25 bp, Artificial Sequence
  Synthetic Oligonucleotide
ttgaagatggaagagtcgtagacgc

SEQ ID NO: 2104 - DNA, 25 bp, Artificial Sequence
  Synthetic Oligonucleotide
atacgtattgtatacgatctacaac

SEQ ID NO: 2105 - DNA, 25 bp, Artificial Sequence
  Synthetic Oligonucleotide
acccgaccgtctatggaacttcaac

SEQ ID NO: 2106 - DNA, 25 bp, Artificial Sequence
  Synthetic Oligonucleotide
tcaccagtattctgggagttattaa

SEQ ID NO: 2107 - DNA, 25 bp, Artificial Sequence
  Synthetic Oligonucleotide
gcgaacacgccctggggcagttaag

SEQ ID NO: 2108 - DNA, 25 bp, Artificial Sequence
  Synthetic Oligonucleotide
cgtaaagtggcgttgtgtcctttaa

SEQ ID NO: 2109 - DNA, 25 bp, Artificial Sequence
  Synthetic Oligonucleotide
atttaagtgaatggtgtcccatata

SEQ ID NO: 2110 - DNA, 25 bp, Artificial Sequence
  Synthetic Oligonucleotide
tgttacggtacatgttaccccatga

SEQ ID NO: 2111 - DNA, 25 bp, Artificial Sequence
  Synthetic Oligonucleotide
ctttcggtccactcatacctagtgg

SEQ ID NO: 2112 - DNA, 25 bp, Artificial Sequence
  Synthetic Oligonucleotide
cacgtgttgacccctgtcaaaaggg

SEQ ID NO: 2113 - DNA, 25 bp, Artificial Sequence
  Synthetic Oligonucleotide
gtagtatgaaccctccaaagaggtc

SEQ ID NO: 2114 - DNA, 25 bp, Artificial Sequence
  Synthetic Oligonucleotide
gaacctacaccaacggcaaagagtc

SEQ ID NO: 2115 - DNA, 25 bp, Artificial Sequence
  Synthetic Oligonucleotide
gtaacctaaggacccgacggaaatg

SEQ ID NO: 2116 - DNA, 25 bp, Artificial Sequence
  Synthetic Oligonucleotide
gtagtccaaaacttccggatgactt

SEQ ID NO: 2117 - DNA, 25 bp, Artificial Sequence
  Synthetic Oligonucleotide
aatattacaaaagtgtcggaagcct

SEQ ID NO: 2118 - DNA, 25 bp, Artificial Sequence
  Synthetic Oligonucleotide
ttacggttaaataacggtcaaagcc

SEQ ID NO: 2119 - DNA, 25 bp, Artificial Sequence
  Synthetic Oligonucleotide
ttttggtataaagaagttcacaggc

SEQ ID NO: 2120 - DNA, 25 bp, Artificial Sequence
  Synthetic Oligonucleotide
cggtgaaccatcaagtccaatagac

SEQ ID NO: 2121 - DNA, 25 bp, Artificial Sequence
  Synthetic Oligonucleotide
ggtcaccttcgagcttactacaaga

SEQ ID NO: 2122 - DNA, 25 bp, Artificial Sequence
  Synthetic Oligonucleotide
cacgctgacctttcgcttctgaaga

SEQ ID NO: 2123 - DNA, 25 bp, Artificial Sequence
  Synthetic Oligonucleotide
agacacttaaatggtcgtttgggct

SEQ ID NO: 2124 - DNA, 25 bp, Artificial Sequence
  Synthetic Oligonucleotide
tagccttaattgctctgtttagcga

SEQ ID NO: 2125 - DNA, 25 bp, Artificial Sequence
  Synthetic Oligonucleotide
tgccttagagagtcggggttaacac

SEQ ID NO: 2126 - DNA, 25 bp, Artificial Sequence
  Synthetic Oligonucleotide
ggcagttgcagatgtgcttctaaac

SEQ ID NO: 2127 - DNA, 25 bp, Artificial Sequence
  Synthetic Oligonucleotide
gcttttgttacgtacttgttcatta

SEQ ID NO: 2128 - DNA, 25 bp, Artificial Sequence
  Synthetic Oligonucleotide
taccttttacggtctgttactaaga

SEQ ID NO: 2129 - DNA, 25 bp, Artificial Sequence
  Synthetic Oligonucleotide
atctacgccgaatggcccttcttgg

SEQ ID NO: 2130 - DNA, 25 bp, Artificial Sequence
  Synthetic Oligonucleotide
atcactacctcactccctgtcttgg

SEQ ID NO: 2131 - DNA, 25 bp, Artificial Sequence
  Synthetic Oligonucleotide
aaaaaactgtctggtcccatttgtg

SEQ ID NO: 2132 - DNA, 25 bp, Artificial Sequence
  Synthetic Oligonucleotide
gaaacgagttttaatcaccctttga

SEQ ID NO: 2133 - DNA, 25 bp, Artificial Sequence
  Synthetic Oligonucleotide
gttagggtccttagtaccattttgg

SEQ ID NO: 2134 - DNA, 25 bp, Artificial Sequence
  Synthetic Oligonucleotide
cagcgactccttaagccatctttgc

SEQ ID NO: 2135 - DNA, 25 bp, Artificial Sequence
  Synthetic Oligonucleotide
agcgactccttttgccatctttgct

SEQ ID NO: 2136 - DNA, 25 bp, Artificial Sequence
  Synthetic Oligonucleotide
ggccccactattggacaattcttct

SEQ ID NO: 2137 - DNA, 25 bp, Artificial Sequence
  Synthetic Oligonucleotide
gcagcacatgttcacacatattttc

SEQ ID NO: 2138 - DNA, 25 bp, Artificial Sequence
  Synthetic Oligonucleotide
ccttgacatgttacacagtaattga

SEQ ID NO: 2139 - DNA, 25 bp, Artificial Sequence
  Synthetic Oligonucleotide
ctcctggctaagtcccagagcagga

SEQ ID NO: 2140 - DNA, 25 bp, Artificial Sequence
  Synthetic Oligonucleotide
tcctgtctaaggtcccaaggcggtg

SEQ ID NO: 2141 - DNA, 25 bp, Artificial Sequence
  Synthetic Oligonucleotide
cggtcgtaacagccccacaggaaga

SEQ ID NO: 2142 - DNA, 25 bp, Artificial Sequence
  Synthetic Oligonucleotide
gacggaacttcggcttaccagacca

SEQ ID NO: 2143 - DNA, 25 bp, Artificial Sequence
  Synthetic Oligonucleotide
cttgaattcacttaacttagaccta

SEQ ID NO: 2144 - DNA, 25 bp, Artificial Sequence
  Synthetic Oligonucleotide
ttgtgacttgatcacaccccatagt

SEQ ID NO: 2145 - DNA, 25 bp, Artificial Sequence
  Synthetic Oligonucleotide
acttgtgacttgttgacaccccata

SEQ ID NO: 2146 - DNA, 25 bp, Artificial Sequence
  Synthetic Oligonucleotide
actgtcgtcgttatgcgaaccccaa

SEQ ID NO: 2147 - DNA, 25 bp, Artificial Sequence
  Synthetic Oligonucleotide
tgtcgtcgttttccgaaccccaata

SEQ ID NO: 2148 - DNA, 25 bp, Artificial Sequence
  Synthetic Oligonucleotide
agcgacgttgacccttgcgcaatta

SEQ ID NO: 2149 - DNA, 25 bp, Artificial Sequence
  Synthetic Oligonucleotide
gactacgttgacttttttctaatga

SEQ ID NO: 2150 - DNA, 25 bp, Artificial Sequence
  Synthetic Oligonucleotide
gcgccttcctaattttcacctgagt

SEQ ID NO: 2151 - DNA, 25 bp, Artificial Sequence
  Synthetic Oligonucleotide
aggccactctcacaattgcttctag

SEQ ID NO: 2152 - DNA, 25 bp, Artificial Sequence
  Synthetic Oligonucleotide
gatgacaccccaaagtttaggttta

SEQ ID NO: 2153 - DNA, 25 bp, Artificial Sequence
  Synthetic Oligonucleotide
aaagaccacctccatgttggaatta

SEQ ID NO: 2154 - DNA, 25 bp, Artificial Sequence
  Synthetic Oligonucleotide
gagccccgactcaacttttggaaga

SEQ ID NO: 2155 - DNA, 25 bp, Artificial Sequence
  Synthetic Oligonucleotide
acgacccaagtcactattgttggaa

SEQ ID NO: 2156 - DNA, 25 bp, Artificial Sequence
  Synthetic Oligonucleotide
cacgtctttgtcacggttttggtta

SEQ ID NO: 2157 - DNA, 25 bp, Artificial Sequence
  Synthetic Oligonucleotide
tcgtcttctgcgtgtcttctttata

SEQ ID NO: 2158 - DNA, 25 bp, Artificial Sequence
  Synthetic Oligonucleotide
agcgcctttgcgtcggtctggtgca

SEQ ID NO: 2159 - DNA, 25 bp, Artificial Sequence
  Synthetic Oligonucleotide
gtgcctttctgttaggtcagttgaa

SEQ ID NO: 2160 - DNA, 25 bp, Artificial Sequence
  Synthetic Oligonucleotide
taggcctacttgtaagcacttgaga

SEQ ID NO: 2161 - DNA, 25 bp, Artificial Sequence
  Synthetic Oligonucleotide
gagcgaccgccgtaagtgtttcgga

SEQ ID NO: 2162 - DNA, 25 bp, Artificial Sequence
  Synthetic Oligonucleotide
tgttaaagcaaggactgttgtggac

SEQ ID NO: 2163 - DNA, 25 bp, Artificial Sequence
  Synthetic Oligonucleotide
tttataagccaccatagtgtgatca

SEQ ID NO: 2164 - DNA, 25 bp, Artificial Sequence
  Synthetic Oligonucleotide
gtttgaaacccgagagtcggagatg

SEQ ID NO: 2165 - DNA, 25 bp, Artificial Sequence
  Synthetic Oligonucleotide
tgttgcatcagtggaggtcggagcc

SEQ ID NO: 2166 - DNA, 25 bp, Artificial Sequence
  Synthetic Oligonucleotide
ggagaattagtagcggagtcaaggc

SEQ ID NO: 2167 - DNA, 25 bp, Artificial Sequence
  Synthetic Oligonucleotide
gtccgcgggttaagctggtttaggc

SEQ ID NO: 2168 - DNA, 25 bp, Artificial Sequence
  Synthetic Oligonucleotide
catccgcaggaacaccgggtaaggc

SEQ ID NO: 2169 - DNA, 25 bp, Artificial Sequence
  Synthetic Oligonucleotide
atcagccgttcagacgcgggcagga

SEQ ID NO: 2170 - DNA, 25 bp, Artificial Sequence
  Synthetic Oligonucleotide
tcttcagccgtcgaccaggcagtga

SEQ ID NO: 2171 - DNA, 25 bp, Artificial Sequence
  Synthetic Oligonucleotide
gttagagcccacggacttgcggtga

SEQ ID NO: 2172 - DNA, 25 bp, Artificial Sequence
  Synthetic Oligonucleotide
tcataggcttgaccaatagcatggt

SEQ ID NO: 2173 - DNA, 25 bp, Artificial Sequence
  Synthetic Oligonucleotide
gcgcgggtcatgctcaaatcatcga

SEQ ID NO: 2174 - DNA, 25 bp, Artificial Sequence
  Synthetic Oligonucleotide
gaacaggcagtcgttcaagcatcct

SEQ ID NO: 2175 - DNA, 25 bp, Artificial Sequence
  Synthetic Oligonucleotide
tcagaaaggccactctcaaaattgt

SEQ ID NO: 2176 - DNA, 25 bp, Artificial Sequence
  Synthetic Oligonucleotide
cataaggattaagttgaagggtctt

SEQ ID NO: 2177 - DNA, 25 bp, Artificial Sequence
  Synthetic Oligonucleotide
cagcagttctacgatggcaagtcct

SEQ ID NO: 2178 - DNA, 25 bp, Artificial Sequence
  Synthetic Oligonucleotide
aggacttgccatcgtagaactgctg

SEQ ID NO: 2179 - DNA, 25 bp, Artificial Sequence
  Synthetic Oligonucleotide
taagtccatgcccaagtagtctgca

SEQ ID NO: 2180 - DNA, 25 bp, Artificial Sequence
  Synthetic Oligonucleotide
gtaaggttaatgtcccggagctttc

SEQ ID NO: 2181 - DNA, 25 bp, Artificial Sequence
  Synthetic Oligonucleotide
ggaaagttgctgtcccagcttgaac

SEQ ID NO: 2182 - DNA, 25 bp, Artificial Sequence
  Synthetic Oligonucleotide
gtgcaatatttgtaacacagccaaa

SEQ ID NO: 2183 - DNA, 25 bp, Artificial Sequence
  Synthetic Oligonucleotide
gtcccggttaaatatgaagccttaa

SEQ ID NO: 2184 - DNA, 25 bp, Artificial Sequence
  Synthetic Oligonucleotide
cttgcaaaagaagaaccgttctaga

SEQ ID NO: 2185 - DNA, 25 bp, Artificial Sequence
  Synthetic Oligonucleotide
aaccaaaggtagaaggaccgtttga

SEQ ID NO: 2186 - DNA, 25 bp, Artificial Sequence
  Synthetic Oligonucleotide
aatacaggagaagtgagacctttca

SEQ ID NO: 2187 - DNA, 25 bp, Artificial Sequence
  Synthetic Oligonucleotide
taatcccgaaaacacgagtcaatta

SEQ ID NO: 2188 - DNA, 25 bp, Artificial Sequence
  Synthetic Oligonucleotide
atcatggttctactaccctacctta

SEQ ID NO: 2189 - DNA, 25 bp, Artificial Sequence
  Synthetic Oligonucleotide
aacagtcacttctgcggccacctga

SEQ ID NO: 2190 - DNA, 25 bp, Artificial Sequence
  Synthetic Oligonucleotide
caaggtcgaactggtccggctccca

SEQ ID NO: 2191 - DNA, 25 bp, Artificial Sequence
  Synthetic Oligonucleotide
ctgctcgaacttcgccggcaccggt

SEQ ID NO: 2192 - DNA, 25 bp, Artificial Sequence
  Synthetic Oligonucleotide
gttgttgtcctttctccgtcaaggg

SEQ ID NO: 2193 - DNA, 25 bp, Artificial Sequence
  Synthetic Oligonucleotide
ttagagatcctactccagcagcgga

SEQ ID NO: 2194 - DNA, 25 bp, Artificial Sequence
  Synthetic Oligonucleotide
gtcgtgttcctactaaagttatgga

SEQ ID NO: 2195 - DNA, 25 bp, Artificial Sequence
  Synthetic Oligonucleotide
gtctgaaacgacttaaatttaagta

SEQ ID NO: 2196 - DNA, 25 bp, Artificial Sequence
  Synthetic Oligonucleotide
cgtcgcggaggcgaacattagcaga

SEQ ID NO: 2197 - DNA, 25 bp, Artificial Sequence
  Synthetic Oligonucleotide
ccgactcggaggtccacccaaagta

SEQ ID NO: 2198 - DNA, 25 bp, Artificial Sequence
  Synthetic Oligonucleotide
cctcccagaaggacctccgtaattt

SEQ ID NO: 2199 - DNA, 25 bp, Artificial Sequence
  Synthetic Oligonucleotide
cacctgaggaagacctacaacatca

SEQ ID NO: 2200 - DNA, 25 bp, Artificial Sequence
  Synthetic Oligonucleotide
ctcctggtttacctcccaactaagg

SEQ ID NO: 2201 - DNA, 25 bp, Artificial Sequence
  Synthetic Oligonucleotide
ctacctcggtttcgccactaaagga

SEQ ID NO: 2202 - DNA, 25 bp, Artificial Sequence
  Synthetic Oligonucleotide
actcggaggtccacccaaagtagaa

SEQ ID NO: 2203 - DNA, 25 bp, Artificial Sequence
  Synthetic Oligonucleotide
tcccacggcactttccaagagggac

SEQ ID NO: 2204 - DNA, 25 bp, Artificial Sequence
  Synthetic Oligonucleotide
tccacagaaaaagtctaagaccccg

SEQ ID NO: 2205 - DNA, 25 bp, Artificial Sequence
  Synthetic Oligonucleotide
acgggagaaacgaaggcaggacccc

SEQ ID NO: 2206 - DNA, 25 bp, Artificial Sequence
  Synthetic Oligonucleotide
gtatggccatagaggccgagccgcc

SEQ ID NO: 2207 - DNA, 25 bp, Artificial Sequence
  Synthetic Oligonucleotide
gttacggcccagtacccgcggggca

SEQ ID NO: 2208 - DNA, 25 bp, Artificial Sequence
  Synthetic Oligonucleotide
ggaggtcccactaccagaacggcca

SEQ ID NO: 2209 - DNA, 25 bp, Artificial Sequence
  Synthetic Oligonucleotide
aggcttctccgctcgaaaggtcgca

SEQ ID NO: 2210 - DNA, 25 bp, Artificial Sequence
  Synthetic Oligonucleotide
gaggtctacccgtgccgaagttgca

SEQ ID NO: 2211 - DNA, 25 bp, Artificial Sequence
  Synthetic Oligonucleotide
acgaattcaagtcgcccatgaggat

SEQ ID NO: 2212 - DNA, 25 bp, Artificial Sequence
  Synthetic Oligonucleotide
aggagttaacaacacaccatcttga

SEQ ID NO: 2213 - DNA, 25 bp, Artificial Sequence
  Synthetic Oligonucleotide
tatggaaccacagaaccagatggct

SEQ ID NO: 2214 - DNA, 25 bp, Artificial Sequence
  Synthetic Oligonucleotide
aataaagcttaagatcctaatggac

SEQ ID NO: 2215 - DNA, 25 bp, Artificial Sequence
  Synthetic Oligonucleotide
aaaacgtaagaaagccgttatggac

SEQ ID NO: 2216 - DNA, 25 bp, Artificial Sequence
  Synthetic Oligonucleotide
gaacctacaagcaccattatgtgtt

SEQ ID NO: 2217 - DNA, 25 bp, Artificial Sequence
  Synthetic Oligonucleotide
aacagaccataaacctagtttgtga

SEQ ID NO: 2218 - DNA, 25 bp, Artificial Sequence
  Synthetic Oligonucleotide
tgccataccacaaacttgttttggt

SEQ ID NO: 2219 - DNA, 25 bp, Artificial Sequence
  Synthetic Oligonucleotide
gaccgagtatcctcctctttcatgg

SEQ ID NO: 2220 - DNA, 25 bp, Artificial Sequence
  Synthetic Oligonucleotide
gagcgaagttgctaaagttatatgg

SEQ ID NO: 2221 - DNA, 25 bp, Artificial Sequence
  Synthetic Oligonucleotide
tagtaggtgcataactatctattga

SEQ ID NO: 2222 - DNA, 25 bp, Artificial Sequence
  Synthetic Oligonucleotide
gccaaaatcgcctgtacttccttga

SEQ ID NO: 2223 - DNA, 25 bp, Artificial Sequence
  Synthetic Oligonucleotide
aaacgaaacgtggtcattcttgtta

SEQ ID NO: 2224 - DNA, 25 bp, Artificial Sequence
  Synthetic Oligonucleotide
agtaggaatcgcggcatttagttag

SEQ ID NO: 2225 - DNA, 25 bp, Artificial Sequence
  Synthetic Oligonucleotide
agtggagatcgccgcgttatgctta

SEQ ID NO: 2226 - DNA, 25 bp, Artificial Sequence
  Synthetic Oligonucleotide
gtcctaatggtaccgttgttgtgta

SEQ ID NO: 2227 - DNA, 25 bp, Artificial Sequence
  Synthetic Oligonucleotide
attctttagtgatgacggctaggta

SEQ ID NO: 2228 - DNA, 25 bp, Artificial Sequence
  Synthetic Oligonucleotide
tgtttatttcggtacggttagagta

SEQ ID NO: 2229 - DNA, 25 bp, Artificial Sequence
  Synthetic Oligonucleotide
tgacacattccttccggttagagta

SEQ ID NO: 2230 - DNA, 25 bp, Artificial Sequence
  Synthetic Oligonucleotide
tgcaagtgggtttgcgtactaacta

SEQ ID NO: 2231 - DNA, 25 bp, Artificial Sequence
  Synthetic Oligonucleotide
ccccagtcgcgggcagccgtacata

SEQ ID NO: 2232 - DNA, 25 bp, Artificial Sequence
  Synthetic Oligonucleotide
aacaccgaggtgaggcggtccgaaa

SEQ ID NO: 2233 - DNA, 25 bp, Artificial Sequence
  Synthetic Oligonucleotide
gccgtaggtttcgccgccgctagac

SEQ ID NO: 2234 - DNA, 25 bp, Artificial Sequence
  Synthetic Oligonucleotide
acgccagtcgctacgggcccatgta

SEQ ID NO: 2235 - DNA, 25 bp, Artificial Sequence
  Synthetic Oligonucleotide
cgactaagacggttcgggcaaggga

SEQ ID NO: 2236 - DNA, 25 bp, Artificial Sequence
  Synthetic Oligonucleotide
gtaagccagaactggcagactggta

SEQ ID NO: 2237 - DNA, 25 bp, Artificial Sequence
  Synthetic Oligonucleotide
tttattaagacactgaacgctgtta

SEQ ID NO: 2238 - DNA, 25 bp, Artificial Sequence
  Synthetic Oligonucleotide
cttttgaaacaggtgcgattagttc

SEQ ID NO: 2239 - DNA, 25 bp, Artificial Sequence
  Synthetic Oligonucleotide
tatgtgaaagacgagtaccaaattc

SEQ ID NO: 2240 - DNA, 25 bp, Artificial Sequence
  Synthetic Oligonucleotide
tggaaaaacgggttctaaagtctcg

SEQ ID NO: 2241 - DNA, 25 bp, Artificial Sequence
  Synthetic Oligonucleotide
ttcaacgaaaggtcgtttctagtta

SEQ ID NO: 2242 - DNA, 25 bp, Artificial Sequence
  Synthetic Oligonucleotide
agacaccaacggaccttctagacta

SEQ ID NO: 2243 - DNA, 25 bp, Artificial Sequence
  Synthetic Oligonucleotide
tatacgacgcactgttctttcagga

SEQ ID NO: 2244 - DNA, 25 bp, Artificial Sequence
  Synthetic Oligonucleotide
ggtttagctaagagttttaccgcac

SEQ ID NO: 2245 - DNA, 25 bp, Artificial Sequence
  Synthetic Oligonucleotide
ttattcgcatatgttgtcacccgac

SEQ ID NO: 2246 - DNA, 25 bp, Artificial Sequence
  Synthetic Oligonucleotide
ctgtgacgcaaccgaaggcatggtc

SEQ ID NO: 2247 - DNA, 25 bp, Artificial Sequence
  Synthetic Oligonucleotide
actgtggagatcgaagcttaaggct

SEQ ID NO: 2248 - DNA, 25 bp, Artificial Sequence
  Synthetic Oligonucleotide
cgtagcaaataccagccttgatgct

SEQ ID NO: 2249 - DNA, 25 bp, Artificial Sequence
  Synthetic Oligonucleotide
ggagcaacttctcgttattaatgtt

SEQ ID NO: 2250 - DNA, 25 bp, Artificial Sequence
  Synthetic Oligonucleotide
gagcaagtaccccttattaacgtta

SEQ ID NO: 2251 - DNA, 25 bp, Artificial Sequence
  Synthetic Oligonucleotide
gggccaacgacatcggtttaagtaa

SEQ ID NO: 2252 - DNA, 25 bp, Artificial Sequence
  Synthetic Oligonucleotide
cagggcctccaagaggtccagtaag

SEQ ID NO: 2253 - DNA, 25 bp, Artificial Sequence
  Synthetic Oligonucleotide
cgtctctccagcagagctccagtta

SEQ ID NO: 2254 - DNA, 25 bp, Artificial Sequence
  Synthetic Oligonucleotide
cagcctctccgcagatcttcgtaaa

SEQ ID NO: 2255 - DNA, 25 bp, Artificial Sequence
  Synthetic Oligonucleotide
cagcgctgccacgtctacttcttga

SEQ ID NO: 2256 - DNA, 25 bp, Artificial Sequence
  Synthetic Oligonucleotide
ctctgctacaccagtttgtcgagta

SEQ ID NO: 2257 - DNA, 25 bp, Artificial Sequence
  Synthetic Oligonucleotide
ttataacctgttacccgctttcgga

SEQ ID NO: 2258 - DNA, 25 bp, Artificial Sequence
  Synthetic Oligonucleotide
gaccttttctcacgttactcgagta

SEQ ID NO: 2259 - DNA, 25 bp, Artificial Sequence
  Synthetic Oligonucleotide
cgcggttttcgttcttgcagtcgta

SEQ ID NO: 2260 - DNA, 25 bp, Artificial Sequence
  Synthetic Oligonucleotide
accttgtttatgttttacgacagga

SEQ ID NO: 2261 - DNA, 25 bp, Artificial Sequence
  Synthetic Oligonucleotide
actcttgtaagacgtccttccccta

SEQ ID NO: 2262 - DNA, 25 bp, Artificial Sequence
  Synthetic Oligonucleotide
gcaatgttgaatgttcatccatcta

SEQ ID NO: 2263 - DNA, 25 bp, Artificial Sequence
  Synthetic Oligonucleotide
gagaggtttaatgttgagcccgtgg

SEQ ID NO: 2264 - DNA, 25 bp, Artificial Sequence
  Synthetic Oligonucleotide
agggatttattggtgactaaatagg

SEQ ID NO: 2265 - DNA, 25 bp, Artificial Sequence
  Synthetic Oligonucleotide
aacggagtttttctacaatgatagc

SEQ ID NO: 2266 - DNA, 25 bp, Artificial Sequence
  Synthetic Oligonucleotide
gaaggctttggcaactaaggctaga

SEQ ID NO: 2267 - DNA, 25 bp, Artificial Sequence
  Synthetic Oligonucleotide
tggtttacttctcaactaaggaaga

SEQ ID NO: 2268 - DNA, 25 bp, Artificial Sequence
  Synthetic Oligonucleotide
tcgatttctttcgaaccgagaccag

SEQ ID NO: 2269 - DNA, 25 bp, Artificial Sequence
  Synthetic Oligonucleotide
gggttgatgttgtatcactagacca

SEQ ID NO: 2270 - DNA, 25 bp, Artificial Sequence
  Synthetic Oligonucleotide
agtttggtcctttgttaagaccgag

SEQ ID NO: 2271 - DNA, 25 bp, Artificial Sequence
  Synthetic Oligonucleotide
tagtttggtcctttgttaagaccga

SEQ ID NO: 2272 - DNA, 25 bp, Artificial Sequence
  Synthetic Oligonucleotide
tttttgctagctccagtggagcaga

SEQ ID NO: 2273 - DNA, 25 bp, Artificial Sequence
  Synthetic Oligonucleotide
tcttttagctcaaacgcggacggta

SEQ ID NO: 2274 - DNA, 25 bp, Artificial Sequence
  Synthetic Oligonucleotide
cctttacgcgcttaagcgacagtta

SEQ ID NO: 2275 - DNA, 25 bp, Artificial Sequence
  Synthetic Oligonucleotide
tgcctttcgtgacacagctataata

SEQ ID NO: 2276 - DNA, 25 bp, Artificial Sequence
  Synthetic Oligonucleotide
ggagctttctcaggacataacaata

SEQ ID NO: 2277 - DNA, 25 bp, Artificial Sequence
  Synthetic Oligonucleotide
gtggggttccggttcagtagtcaaa

SEQ ID NO: 2278 - DNA, 25 bp, Artificial Sequence
  Synthetic Oligonucleotide
ccggaggccccgtcgttggtgaaca

SEQ ID NO: 2279 - DNA, 25 bp, Artificial Sequence
  Synthetic Oligonucleotide
accaggcctccctacgggaggaaca

SEQ ID NO: 2280 - DNA, 25 bp, Artificial Sequence
  Synthetic Oligonucleotide
tctggctactggtgggccggatata

SEQ ID NO: 2281 - DNA, 25 bp, Artificial Sequence
  Synthetic Oligonucleotide
ctaggcttgtgaagtggcctggtaa

SEQ ID NO: 2282 - DNA, 25 bp, Artificial Sequence
  Synthetic Oligonucleotide
ctaggcttgtgaagtggcctggtaa

SEQ ID NO: 2283 - DNA, 25 bp, Artificial Sequence
  Synthetic Oligonucleotide
tcttgactttcgacgtggcctttta

SEQ ID NO: 2284 - DNA, 25 bp, Artificial Sequence
  Synthetic Oligonucleotide
tcttgactttaacagggtctcttca

SEQ ID NO: 2285 - DNA, 25 bp, Artificial Sequence
  Synthetic Oligonucleotide
tgctgccagatttgggtcgagtgca

SEQ ID NO: 2286 - DNA, 25 bp, Artificial Sequence
  Synthetic Oligonucleotide
tgctgccagatttgggtcgagtgca

SEQ ID NO: 2287 - DNA, 25 bp, Artificial Sequence
  Synthetic Oligonucleotide
tgaggccacctgagttgctgtatca

SEQ ID NO: 2288 - DNA, 25 bp, Artificial Sequence
  Synthetic Oligonucleotide
cgagccctaccagtgactgtttgaa

SEQ ID NO: 2289 - DNA, 25 bp, Artificial Sequence
  Synthetic Oligonucleotide
tcggtccttacctaccgggttttca

SEQ ID NO: 2290 - DNA, 25 bp, Artificial Sequence
  Synthetic Oligonucleotide
ttgtgccttcctgtaagggcattcg

SEQ ID NO: 2291 - DNA, 25 bp, Artificial Sequence
  Synthetic Oligonucleotide
taggcagctgctggaacggcttttg

SEQ ID NO: 2292 - DNA, 25 bp, Artificial Sequence
  Synthetic Oligonucleotide
acgggagatcttgaaacggctttgg

SEQ ID NO: 2293 - DNA, 25 bp, Artificial Sequence
  Synthetic Oligonucleotide
cgccgcatttggtcggcggtcgtgg

SEQ ID NO: 2294 - DNA, 25 bp, Artificial Sequence
  Synthetic Oligonucleotide
actacaattttgaccggcgggacgg

SEQ ID NO: 2295 - DNA, 25 bp, Artificial Sequence
  Synthetic Oligonucleotide
atccactggctgctgggccggccgt

SEQ ID NO: 2296 - DNA, 25 bp, Artificial Sequence
  Synthetic Oligonucleotide
ctgagttgctgtatcagccgaggtc

SEQ ID NO: 2297 - DNA, 25 bp, Artificial Sequence
  Synthetic Oligonucleotide
aaacgtggtttctcggaccccgggc

SEQ ID NO: 2298 - DNA, 25 bp, Artificial Sequence
  Synthetic Oligonucleotide
ctcttgtaatctagcgccccgtttc

SEQ ID NO: 2299 - DNA, 25 bp, Artificial Sequence
  Synthetic Oligonucleotide
tgggagatactgcaggacaaggttc

SEQ ID NO: 2300 - DNA, 25 bp, Artificial Sequence
  Synthetic Oligonucleotide
ggtacgggagatcttgaaacggctt

SEQ ID NO: 2301 - DNA, 25 bp, Artificial Sequence
  Synthetic Oligonucleotide
aatagggacaccattgaaaagactg

SEQ ID NO: 2302 - DNA, 25 bp, Artificial Sequence
  Synthetic Oligonucleotide
aatagggacaccattgaaaagactg

SEQ ID NO: 2303 - DNA, 25 bp, Artificial Sequence
  Synthetic Oligonucleotide
aggacttgccatcgtagaactgctg

SEQ ID NO: 2304 - DNA, 25 bp, Artificial Sequence
  Synthetic Oligonucleotide
cagcagttctacgatggcaagtcct

SEQ ID NO: 2305 - DNA, 25 bp, Artificial Sequence
  Synthetic Oligonucleotide
taagtccatgccgaagtagtctgca

SEQ ID NO: 2306 - DNA, 25 bp, Artificial Sequence
  Synthetic Oligonucleotide
gtaaggttaatgacccggagctttc

SEQ ID NO: 2307 - DNA, 25 bp, Artificial Sequence
  Synthetic Oligonucleotide
ggaaagttgctgacccagcttgaac

SEQ ID NO: 2308 - DNA, 25 bp, Artificial Sequence
  Synthetic Oligonucleotide
gtgcaatatttgaaacacagccaaa

SEQ ID NO: 2309 - DNA, 25 bp, Artificial Sequence
  Synthetic Oligonucleotide
gtcccggttaaaaatgaagccttaa

SEQ ID NO: 2310 - DNA, 25 bp, Artificial Sequence
  Synthetic Oligonucleotide
cttgcaaaagaacaaccgttctaga

SEQ ID NO: 2311 - DNA, 25 bp, Artificial Sequence
  Synthetic Oligonucleotide
aaccaaaggtagtaggaccgtttga

SEQ ID NO: 2312 - DNA, 25 bp, Artificial Sequence
  Synthetic Oligonucleotide
aatacaggagaactgagacctttca

SEQ ID NO: 2313 - DNA, 25 bp, Artificial Sequence
  Synthetic Oligonucleotide
taatcccgaaaagacgagtcaatta

SEQ ID NO: 2314 - DNA, 25 bp, Artificial Sequence
  Synthetic Oligonucleotide
atcatggttctagtaccctacctta

SEQ ID NO: 2315 - DNA, 25 bp, Artificial Sequence
  Synthetic Oligonucleotide
aacagtcacttcagcggccacctga

SEQ ID NO: 2316 - DNA, 25 bp, Artificial Sequence
  Synthetic Oligonucleotide
caaggtcgaactcgtccggctccca

SEQ ID NO: 2317 - DNA, 25 bp, Artificial Sequence
  Synthetic Oligonucleotide
ctgctcgaacttggccggcaccggt

SEQ ID NO: 2318 - DNA, 25 bp, Artificial Sequence
  Synthetic Oligonucleotide
gttgttgtccttactccgtcaaggg

SEQ ID NO: 2319 - DNA, 25 bp, Artificial Sequence
  Synthetic Oligonucleotide
ttagagatcctagtccagcagcgga

SEQ ID NO: 2320 - DNA, 25 bp, Artificial Sequence
  Synthetic Oligonucleotide
gtcgtgttcctagtaaagttatgga

SEQ ID NO: 2321 - DNA, 25 bp, Artificial Sequence
  Synthetic Oligonucleotide
gtctgaaacgacataaatttaagta

SEQ ID NO: 2322 - DNA, 25 bp, Artificial Sequence
  Synthetic Oligonucleotide
cgtcgcggaggccaacattagcaga

SEQ ID NO: 2323 - DNA, 25 bp, Artificial Sequence
  Synthetic Oligonucleotide
ccgactcggaggaccacccaaagta

SEQ ID NO: 2324 - DNA, 25 bp, Artificial Sequence
  Synthetic Oligonucleotide
cctcccagaaggtcctccgtaattt

SEQ ID NO: 2325 - DNA, 25 bp, Artificial Sequence
  Synthetic Oligonucleotide
cacctgaggaagtcctacaacatca

SEQ ID NO: 2326 - DNA, 25 bp, Artificial Sequence
  Synthetic Oligonucleotide
ctcctggtttacgtcccaactaagg

SEQ ID NO: 2327 - DNA, 25 bp, Artificial Sequence
  Synthetic Oligonucleotide
ctacctcggtttggccactaaagga

SEQ ID NO: 2328 - DNA, 25 bp, Artificial Sequence
  Synthetic Oligonucleotide
actcggaggtcctcccaaagtagaa

SEQ ID NO: 2329 - DNA, 25 bp, Artificial Sequence
  Synthetic Oligonucleotide
tcccacggcactatccaagagggac

SEQ ID NO: 2330 - DNA, 25 bp, Artificial Sequence
  Synthetic Oligonucleotide
tccacagaaaaactctaagaccccg

SEQ ID NO: 2331 - DNA, 25 bp, Artificial Sequence
  Synthetic Oligonucleotide
acgggagaaacgtaggcaggacccc

SEQ ID NO: 2332 - DNA, 25 bp, Artificial Sequence
  Synthetic Oligonucleotide
gtatggccatagtggccgagccgcc

SEQ ID NO: 2333 - DNA, 25 bp, Artificial Sequence
  Synthetic Oligonucleotide
gttacggcccagaacccgcggggca

SEQ ID NO: 2334 - DNA, 25 bp, Artificial Sequence
  Synthetic Oligonucleotide
ggaggtcccacttccagaacggcca

SEQ ID NO: 2335 - DNA, 25 bp, Artificial Sequence
  Synthetic Oligonucleotide
aggcttctccgcacgaaaggtcgca

SEQ ID NO: 2336 - DNA, 25 bp, Artificial Sequence
  Synthetic Oligonucleotide
gaggtctacccgagccgaagttgca

SEQ ID NO: 2337 - DNA, 25 bp, Artificial Sequence
  Synthetic Oligonucleotide
acgaattcaagtggcccatgaggat

SEQ ID NO: 2338 - DNA, 25 bp, Artificial Sequence
  Synthetic Oligonucleotide
aggagttaacaagacaccatcttga

SEQ ID NO: 2339 - DNA, 25 bp, Artificial Sequence
  Synthetic Oligonucleotide
tatggaaccacacaaccagatggct

SEQ ID NO: 2340 - DNA, 25 bp, Artificial Sequence
  Synthetic Oligonucleotide
aataaagcttaacatcctaatggac

SEQ ID NO: 2341 - DNA, 25 bp, Artificial Sequence
  Synthetic Oligonucleotide
aaaacgtaagaatgccgttatggac

SEQ ID NO: 2342 - DNA, 25 bp, Artificial Sequence
  Synthetic Oligonucleotide
gaacctacaagctccattatgtgtt

SEQ ID NO: 2343 - DNA, 25 bp, Artificial Sequence
  Synthetic Oligonucleotide
aacagaccataatcctagtttgtga

SEQ ID NO: 2344 - DNA, 25 bp, Artificial Sequence
  Synthetic Oligonucleotide
tgccataccacatacttgttttggt

SEQ ID NO: 2345 - DNA, 25 bp, Artificial Sequence
  Synthetic Oligonucleotide
gaccgagtatccacctctttcatgg

SEQ ID NO: 2346 - DNA, 25 bp, Artificial Sequence
  Synthetic Oligonucleotide
gagcgaagttgcaaaagttatatgg

SEQ ID NO: 2347 - DNA, 25 bp, Artificial Sequence
  Synthetic Oligonucleotide
tagtaggtgcattactatctattga

SEQ ID NO: 2348 - DNA, 25 bp, Artificial Sequence
  Synthetic Oligonucleotide
gccaaaatcgccagtacttccttga

SEQ ID NO: 2349 - DNA, 25 bp, Artificial Sequence
  Synthetic Oligonucleotide
aaacgaaacgtgctcattcttgtta

SEQ ID NO: 2350 - DNA, 25 bp, Artificial Sequence
  Synthetic Oligonucleotide
agtaggaatcgccgcatttagttag

SEQ ID NO: 2351 - DNA, 25 bp, Artificial Sequence
  Synthetic Oligonucleotide
agtggagatcgcggcgttatgctta

SEQ ID NO: 2352 - DNA, 25 bp, Artificial Sequence
  Synthetic Oligonucleotide
gtcctaatggtagcgttgttgtgta

SEQ ID NO: 2353 - DNA, 25 bp, Artificial Sequence
  Synthetic Oligonucleotide
attctttagtgaagacggctaggta

SEQ ID NO: 2354 - DNA, 25 bp, Artificial Sequence
  Synthetic Oligonucleotide
tgtttatttcggaacggttagagta

SEQ ID NO: 2355 - DNA, 25 bp, Artificial Sequence
  Synthetic Oligonucleotide
tgacacattcctaccggttagagta

SEQ ID NO: 2356 - DNA, 25 bp, Artificial Sequence
  Synthetic Oligonucleotide
tgcaagtgggttagcgtactaacta

SEQ ID NO: 2357 - DNA, 25 bp, Artificial Sequence
  Synthetic Oligonucleotide
ccccagtcgcggccagccgtacata

SEQ ID NO: 2358 - DNA, 25 bp, Artificial Sequence
  Synthetic Oligonucleotide
aacaccgaggtgtggcggtccgaaa

SEQ ID NO: 2359 - DNA, 25 bp, Artificial Sequence
  Synthetic Oligonucleotide
gccgtaggtttccccgccgctagac

SEQ ID NO: 2360 - DNA, 25 bp, Artificial Sequence
  Synthetic Oligonucleotide
acgccagtcgcttcgggcccatgta

SEQ ID NO: 2361 - DNA, 25 bp, Artificial Sequence
  Synthetic Oligonucleotide
cgactaagacggatcgggcaaggga

SEQ ID NO: 2362 - DNA, 25 bp, Artificial Sequence
  Synthetic Oligonucleotide
gtaagccagaacaggcagactggta

SEQ ID NO: 2363 - DNA, 25 bp, Artificial Sequence
  Synthetic Oligonucleotide
tttattaagacagtgaacgctgtta

SEQ ID NO: 2364 - DNA, 25 bp, Artificial Sequence
  Synthetic Oligonucleotide
cttttgaaacagctgcgattagttc

SEQ ID NO: 2365 - DNA, 25 bp, Artificial Sequence
  Synthetic Oligonucleotide
tatgtgaaagaccagtaccaaattc

SEQ ID NO: 2366 - DNA, 25 bp, Artificial Sequence
  Synthetic Oligonucleotide
tggaaaaacgggatctaaagtctcg

SEQ ID NO: 2367 - DNA, 25 bp, Artificial Sequence
  Synthetic Oligonucleotide
ttcaacgaaaggacgtttctagtta

SEQ ID NO: 2368 - DNA, 25 bp, Artificial Sequence
  Synthetic Oligonucleotide
agacaccaacggtccttctagacta

SEQ ID NO: 2369 - DNA, 25 bp, Artificial Sequence
  Synthetic Oligonucleotide
tatacgacgcacagttctttcagga

SEQ ID NO: 2370 - DNA, 25 bp, Artificial Sequence
  Synthetic Oligonucleotide
ggtttagctaagtgttttaccgcac

SEQ ID NO: 2371 - DNA, 25 bp, Artificial Sequence
  Synthetic Oligonucleotide
ttattcgcatatcttgtcacccgac

SEQ ID NO: 2372 - DNA, 25 bp, Artificial Sequence
  Synthetic Oligonucleotide
ctgtgacgcaacggaaggcatggtc

SEQ ID NO: 2373 - DNA, 25 bp, Artificial Sequence
  Synthetic Oligonucleotide
actgtggagatccaagcttaaggct

SEQ ID NO: 2374 - DNA, 25 bp, Artificial Sequence
  Synthetic Oligonucleotide
cgtagcaaatacgagccttgatgct

SEQ ID NO: 2375 - DNA, 25 bp, Artificial Sequence
  Synthetic Oligonucleotide
ggagcaacttctggttattaatgtt

SEQ ID NO: 2376 - DNA, 25 bp, Artificial Sequence
  Synthetic Oligonucleotide
gagcaagtacccgttattaacgtta

SEQ ID NO: 2377 - DNA, 25 bp, Artificial Sequence
  Synthetic Oligonucleotide
gggccaacgacaacggtttaagtaa

SEQ ID NO: 2378 - DNA, 25 bp, Artificial Sequence
  Synthetic Oligonucleotide
cagggcctccaacaggtccagtaag

SEQ ID NO: 2379 - DNA, 25 bp, Artificial Sequence
  Synthetic Oligonucleotide
cgtctctccagctgagctccagtta

SEQ ID NO: 2380 - DNA, 25 bp, Artificial Sequence
  Synthetic Oligonucleotide
cagcctctccgctgatcttcgtaaa

SEQ ID NO: 2381 - DNA, 25 bp, Artificial Sequence
  Synthetic Oligonucleotide
cagcgctgccacctctacttcttga

SEQ ID NO: 2382 - DNA, 25 bp, Artificial Sequence
  Synthetic Oligonucleotide
ctctgctacacctgtttgtcgagta

SEQ ID NO: 2383 - DNA, 25 bp, Artificial Sequence
  Synthetic Oligonucleotide
ttataacctgtttcccgctttcgga

SEQ ID NO: 2384 - DNA, 25 bp, Artificial Sequence
  Synthetic Oligonucleotide
gaccttttctcaggttactcgagta

SEQ ID NO: 2385 - DNA, 25 bp, Artificial Sequence
  Synthetic Oligonucleotide
cgcggttttcgtacttgcagtcgta

SEQ ID NO: 2386 - DNA, 25 bp, Artificial Sequence
  Synthetic Oligonucleotide
accttgtttatgatttacgacagga

SEQ ID NO: 2387 - DNA, 25 bp, Artificial Sequence
  Synthetic Oligonucleotide
actcttgtaagaggtccttccccta

SEQ ID NO: 2388 - DNA, 25 bp, Artificial Sequence
  Synthetic Oligonucleotide
gcaatgttgaatcttcatccatcta

SEQ ID NO: 2389 - DNA, 25 bp, Artificial Sequence
  Synthetic Oligonucleotide
gagaggtttaatcttgagcccgtgg

SEQ ID NO: 2390 - DNA, 25 bp, Artificial Sequence
  Synthetic Oligonucleotide
agggatttattgctgactaaatagg

SEQ ID NO: 2391 - DNA, 25 bp, Artificial Sequence
  Synthetic Oligonucleotide
aacggagtttttgtacaatgatagc

SEQ ID NO: 2392 - DNA, 25 bp, Artificial Sequence
  Synthetic Oligonucleotide
gaaggctttggctactaaggctaga

SEQ ID NO: 2393 - DNA, 25 bp, Artificial Sequence
  Synthetic Oligonucleotide
tggtttacttctgaactaaggaaga

SEQ ID NO: 2394 - DNA, 25 bp, Artificial Sequence
  Synthetic Oligonucleotide
tcgatttctttccaaccgagaccag

SEQ ID NO: 2395 - DNA, 25 bp, Artificial Sequence
  Synthetic Oligonucleotide
gggttgatgttgaatcactagacca

SEQ ID NO: 2396 - DNA, 25 bp, Artificial Sequence
  Synthetic Oligonucleotide
agtttggtccttagttaagaccgag

SEQ ID NO: 2397 - DNA, 25 bp, Artificial Sequence
  Synthetic Oligonucleotide
tagtttggtcctatgttaagaccga

SEQ ID NO: 2398 - DNA, 25 bp, Artificial Sequence
  Synthetic Oligonucleotide
tttttgctagctgcagtggagcaga

SEQ ID NO: 2399 - DNA, 25 bp, Artificial Sequence
  Synthetic Oligonucleotide
tcttttagctcatacgcggacggta

SEQ ID NO: 2400 - DNA, 25 bp, Artificial Sequence
  Synthetic Oligonucleotide
cctttacgcgctaaagcgacagtta

SEQ ID NO: 2401 - DNA, 25 bp, Artificial Sequence
  Synthetic Oligonucleotide
tgcctttcgtgagacagctataata

SEQ ID NO: 2402 - DNA, 25 bp, Artificial Sequence
  Synthetic Oligonucleotide
ggagctttctcacgacataacaata

SEQ ID NO: 2403 - DNA, 25 bp, Artificial Sequence
  Synthetic Oligonucleotide
gtggggttccggatcagtagtcaaa

SEQ ID NO: 2404 - DNA, 25 bp, Artificial Sequence
  Synthetic Oligonucleotide
ccggaggccccgacgttggtgaaca

SEQ ID NO: 2405 - DNA, 25 bp, Artificial Sequence
  Synthetic Oligonucleotide
accaggcctcccaacgggaggaaca

SEQ ID NO: 2406 - DNA, 25 bp, Artificial Sequence
  Synthetic Oligonucleotide
tctggctactggagggccggatata

SEQ ID NO: 2407 - DNA, 25 bp, Artificial Sequence
  Synthetic Oligonucleotide
ctaggcttgtgatgtggcctggtaa

SEQ ID NO: 2408 - DNA, 25 bp, Artificial Sequence
  Synthetic Oligonucleotide
ctaggcttgtgatgtggcctggtaa

SEQ ID NO: 2409 - DNA, 25 bp, Artificial Sequence
  Synthetic Oligonucleotide
tcttgactttcgtcgtggcctttta

SEQ ID NO: 2410 - DNA, 25 bp, Artificial Sequence
  Synthetic Oligonucleotide
tcttgactttaagagggtctcttca

SEQ ID NO: 2411 - DNA, 25 bp, Artificial Sequence
  Synthetic Oligonucleotide
tgctgccagattagggtcgagtgca

SEQ ID NO: 2412 - DNA, 25 bp, Artificial Sequence
  Synthetic Oligonucleotide
tgctgccagattagggtcgagtgca

SEQ ID NO: 2413 - DNA, 25 bp, Artificial Sequence
  Synthetic Oligonucleotide
tgaggccacctgtgttgctgtatca

SEQ ID NO: 2414 - DNA, 25 bp, Artificial Sequence
  Synthetic Oligonucleotide
cgagccctaccactgactgtttgaa

SEQ ID NO: 2415 - DNA, 25 bp, Artificial Sequence
  Synthetic Oligonucleotide
tcggtccttaccaaccgggttttca

SEQ ID NO: 2416 - DNA, 25 bp, Artificial Sequence
  Synthetic Oligonucleotide
ttgtgccttcctctaagggcattcg

SEQ ID NO: 2417 - DNA, 25 bp, Artificial Sequence
  Synthetic Oligonucleotide
taggcagctgctcgaacggcttttg

SEQ ID NO: 2418 - DNA, 25 bp, Artificial Sequence
  Synthetic Oligonucleotide
acgggagatcttcaaacggctttgg

SEQ ID NO: 2419 - DNA, 25 bp, Artificial Sequence
  Synthetic Oligonucleotide
cgccgcatttggacggcggtcgtgg

SEQ ID NO: 2420 - DNA, 25 bp, Artificial Sequence
  Synthetic Oligonucleotide
actacaattttgtccggcgggacgg

SEQ ID NO: 2421 - DNA, 25 bp, Artificial Sequence
  Synthetic Oligonucleotide
atccactggctggtgggccggccgt

SEQ ID NO: 2422 - DNA, 25 bp, Artificial Sequence
  Synthetic Oligonucleotide
ctgagttgctgtttcagccgaggtc

SEQ ID NO: 2423 - DNA, 25 bp, Artificial Sequence
  Synthetic Oligonucleotide
aaacgtggtttcacggaccccgggc

SEQ ID NO: 2424 - DNA, 25 bp, Artificial Sequence
  Synthetic Oligonucleotide
ctcttgtaatcttgcgccccgtttc

SEQ ID NO: 2425 - DNA, 25 bp, Artificial Sequence
  Synthetic Oligonucleotide
tgggagatactggaggacaaggttc

SEQ ID NO: 2426 - DNA, 25 bp, Artificial Sequence
  Synthetic Oligonucleotide
ggtacgggagatgttgaaacggctt

SEQ ID NO: 2427 - DNA, 25 bp, Artificial Sequence
  Synthetic Oligonucleotide
aatagggacacctttgaaaagactg

SEQ ID NO: 2428 - DNA, 25 bp, Artificial Sequence
  Synthetic Oligonucleotide
aatagggacacctttgaaaagactg

SEQ ID NO: 2429 - DNA, 25 bp, Artificial Sequence
  Synthetic Oligonucleotide
cagcagttctacgatggcaagtcct

SEQ ID NO: 2430 - DNA, 25 bp, Artificial Sequence
  Synthetic Oligonucleotide
aggacttgccatcgtagaactgctg

SEQ ID NO: 2431 - DNA, 25 bp, Artificial Sequence
  Synthetic Oligonucleotide
ctcacccaagccaggaggtcagtca

SEQ ID NO: 2432 - DNA, 25 bp, Artificial Sequence
  Synthetic Oligonucleotide
cccctagaaccgtttgggctaacac

SEQ ID NO: 2433 - DNA, 25 bp, Artificial Sequence
  Synthetic Oligonucleotide
acctcatcttcatttgaggcctacc

SEQ ID NO: 2434 - DNA, 25 bp, Artificial Sequence
  Synthetic Oligonucleotide
ctaaatttcacctgagtaaggttaa

SEQ ID NO: 2435 - DNA, 25 bp, Artificial Sequence
  Synthetic Oligonucleotide
tgagtctaaccaacgtgaaatttaa

SEQ ID NO: 2436 - DNA, 25 bp, Artificial Sequence
  Synthetic Oligonucleotide
tcgagcgcctcacggcacctattta

SEQ ID NO: 2437 - DNA, 25 bp, Artificial Sequence
  Synthetic Oligonucleotide
tcggaactgacacggcaacttgaac

SEQ ID NO: 2438 - DNA, 25 bp, Artificial Sequence
  Synthetic Oligonucleotide
taccgcctgaaatggcactgtcgcc

SEQ ID NO: 2439 - DNA, 25 bp, Artificial Sequence
  Synthetic Oligonucleotide
ccgccggaccactgggtcaagctgt

SEQ ID NO: 2440 - DNA, 25 bp, Artificial Sequence
  Synthetic Oligonucleotide
ctacccgtgccgaagttgcatcctg

SEQ ID NO: 2441 - DNA, 25 bp, Artificial Sequence
  Synthetic Oligonucleotide
aagtcctgcacgaggtccaacgcgc

SEQ ID NO: 2442 - DNA, 25 bp, Artificial Sequence
  Synthetic Oligonucleotide
aaggctggtactgtggccacaccgc

SEQ ID NO: 2443 - DNA, 25 bp, Artificial Sequence
  Synthetic Oligonucleotide
actgctggctgaaggcctaaccgcg

SEQ ID NO: 2444 - DNA, 25 bp, Artificial Sequence
  Synthetic Oligonucleotide
acggctggaagaaccacgcaaatcg

SEQ ID NO: 2445 - DNA, 25 bp, Artificial Sequence
  Synthetic Oligonucleotide
tacggctggaagaaccacgcaaatc

SEQ ID NO: 2446 - DNA, 25 bp, Artificial Sequence
  Synthetic Oligonucleotide
ctgtttttagaatctcggaaaatct

SEQ ID NO: 2447 - DNA, 25 bp, Artificial Sequence
  Synthetic Oligonucleotide
cggttttcagagtatccgaaacttg

SEQ ID NO: 2448 - DNA, 25 bp, Artificial Sequence
  Synthetic Oligonucleotide
ctttcttggaggtaaggaaacctac

SEQ ID NO: 2449 - DNA, 25 bp, Artificial Sequence
  Synthetic Oligonucleotide
tactggaacgggtgtcggaaccgtc

SEQ ID NO: 2450 - DNA, 25 bp, Artificial Sequence
  Synthetic Oligonucleotide
tactggaacgggtgtcggaaccgtc

SEQ ID NO: 2451 - DNA, 25 bp, Artificial Sequence
  Synthetic Oligonucleotide
tactggaacgggtgtcggaaccgtc

SEQ ID NO: 2452 - DNA, 25 bp, Artificial Sequence
  Synthetic Oligonucleotide
tgccaacaggtgtgtctgagaccgg

SEQ ID NO: 2453 - DNA, 25 bp, Artificial Sequence
  Synthetic Oligonucleotide
ccgcctctactactgggcaaaccga

SEQ ID NO: 2454 - DNA, 25 bp, Artificial Sequence
  Synthetic Oligonucleotide
ctagggccgtagcgcgtgaaaaagg

SEQ ID NO: 2455 - DNA, 25 bp, Artificial Sequence
  Synthetic Oligonucleotide
gcacggccacggtccagaagatgcg

SEQ ID NO: 2456 - DNA, 25 bp, Artificial Sequence
  Synthetic Oligonucleotide
caaccgccggaggacttggaaccgg

SEQ ID NO: 2457 - DNA, 25 bp, Artificial Sequence
  Synthetic Oligonucleotide
taacagcacgggaacatcattaccc

SEQ ID NO: 2458 - DNA, 25 bp, Artificial Sequence
  Synthetic Oligonucleotide
agagacaactggaaacccaactccc

SEQ ID NO: 2459 - DNA, 25 bp, Artificial Sequence
  Synthetic Oligonucleotide
agtaccctaaaggatcctgacctca

SEQ ID NO: 2460 - DNA, 25 bp, Artificial Sequence
  Synthetic Oligonucleotide
agaagtcctcatgctaaatgattca

SEQ ID NO: 2461 - DNA, 25 bp, Artificial Sequence
  Synthetic Oligonucleotide
ggaggtccacccaaagtagaagacc

SEQ ID NO: 2462 - DNA, 25 bp, Artificial Sequence
  Synthetic Oligonucleotide
aggggtccgccagctgaatagcgca

SEQ ID NO: 2463 - DNA, 25 bp, Artificial Sequence
  Synthetic Oligonucleotide
acggaaggaacctacaccatcggca

SEQ ID NO: 2464 - DNA, 25 bp, Artificial Sequence
  Synthetic Oligonucleotide
gagcgcgagccgacaccagtgcttc

SEQ ID NO: 2465 - DNA, 25 bp, Artificial Sequence
  Synthetic Oligonucleotide
cgagaggagggaaacaacaggtatc

SEQ ID NO: 2466 - DNA, 25 bp, Artificial Sequence
  Synthetic Oligonucleotide
gataaggaaggacacctaaaagtgc

SEQ ID NO: 2467 - DNA, 25 bp, Artificial Sequence
  Synthetic Oligonucleotide
taatttagagacccgcaaaaggtct

SEQ ID NO: 2468 - DNA, 25 bp, Artificial Sequence
  Synthetic Oligonucleotide
gcgcattaggccgcgagtaatggtt

SEQ ID NO: 2469 - DNA, 25 bp, Artificial Sequence
  Synthetic Oligonucleotide
cccattaaacgcgcggacgacggaa

SEQ ID NO: 2470 - DNA, 25 bp, Artificial Sequence
  Synthetic Oligonucleotide
caaatgaacctggagacggagtaga

SEQ ID NO: 2471 - DNA, 25 bp, Artificial Sequence
  Synthetic Oligonucleotide
tgcaatggcacttcttaggtatagg

SEQ ID NO: 2472 - DNA, 25 bp, Artificial Sequence
  Synthetic Oligonucleotide
ctccatgtggtctcccgtggtctgc

SEQ ID NO: 2473 - DNA, 25 bp, Artificial Sequence
  Synthetic Oligonucleotide
ctactactgggcaaaccgaggtggg

SEQ ID NO: 2474 - DNA, 25 bp, Artificial Sequence
  Synthetic Oligonucleotide
tcaagaggcgccagaacccgtggag

SEQ ID NO: 2475 - DNA, 25 bp, Artificial Sequence
  Synthetic Oligonucleotide
gaaaaagtctaagaccccgtcgaga

SEQ ID NO: 2476 - DNA, 25 bp, Artificial Sequence
  Synthetic Oligonucleotide
gtagaataagtctaggtttccttgc

SEQ ID NO: 2477 - DNA, 25 bp, Artificial Sequence
  Synthetic Oligonucleotide
ataaaaagtcaagggaatctacttc

SEQ ID NO: 2478 - DNA, 25 bp, Artificial Sequence
  Synthetic Oligonucleotide
gcaaaataagagtcgtatctgtttc

SEQ ID NO: 2479 - DNA, 25 bp, Artificial Sequence
  Synthetic Oligonucleotide
agtgaaaattaagcacacatgaatc

SEQ ID NO: 2480 - DNA, 25 bp, Artificial Sequence
  Synthetic Oligonucleotide
atcttaatttaggacacaaggtttc

SEQ ID NO: 2481 - DNA, 25 bp, Artificial Sequence
  Synthetic Oligonucleotide
tactactttgctaacatgtcgaata

SEQ ID NO: 2482 - DNA, 25 bp, Artificial Sequence
  Synthetic Oligonucleotide
ggaacaccggcaagaggtcgagtta

SEQ ID NO: 2483 - DNA, 25 bp, Artificial Sequence
  Synthetic Oligonucleotide
acgacgactggccgtggctgttata

SEQ ID NO: 2484 - DNA, 25 bp, Artificial Sequence
  Synthetic Oligonucleotide
acgattggtcgcagacctgttgtac

SEQ ID NO: 2485 - DNA, 25 bp, Artificial Sequence
  Synthetic Oligonucleotide
aatggtttggtccgaccgtgttaac

SEQ ID NO: 2486 - DNA, 25 bp, Artificial Sequence
  Synthetic Oligonucleotide
acagtgggcctggagccgtcgaaac

SEQ ID NO: 2487 - DNA, 25 bp, Artificial Sequence
  Synthetic Oligonucleotide
cacgtaggggctgctgactcccgga

SEQ ID NO: 2488 - DNA, 25 bp, Artificial Sequence
  Synthetic Oligonucleotide
ggatatgggtttaagctgctagcta

SEQ ID NO: 2489 - DNA, 25 bp, Artificial Sequence
  Synthetic Oligonucleotide
ttgtgcctcgggtgttggtcccgcc

SEQ ID NO: 2490 - DNA, 25 bp, Artificial Sequence
  Synthetic Oligonucleotide
gtgcctcggactcttggttcacctc

SEQ ID NO: 2491 - DNA, 25 bp, Artificial Sequence
  Synthetic Oligonucleotide
gtgcctctgcctcgtggttcacttc

SEQ ID NO: 2492 - DNA, 25 bp, Artificial Sequence
  Synthetic Oligonucleotide
tgccggaaccgtcgaggtcaccttc

SEQ ID NO: 2493 - DNA, 25 bp, Artificial Sequence
  Synthetic Oligonucleotide
gcgagcgcccggtagtcgtcccata

SEQ ID NO: 2494 - DNA, 25 bp, Artificial Sequence
  Synthetic Oligonucleotide
tcgatacccaggtcttgtaccacac

SEQ ID NO: 2495 - DNA, 25 bp, Artificial Sequence
  Synthetic Oligonucleotide
tagctccgcaaggactattcacgca

SEQ ID NO: 2496 - DNA, 25 bp, Artificial Sequence
  Synthetic Oligonucleotide
atggtccaagggttaatccgtacta

SEQ ID NO: 2497 - DNA, 25 bp, Artificial Sequence
  Synthetic Oligonucleotide
attccagacccttagacccgtacga

SEQ ID NO: 2498 - DNA, 25 bp, Artificial Sequence
  Synthetic Oligonucleotide
cgatggagaaccattccccgtcgat

SEQ ID NO: 2499 - DNA, 25 bp, Artificial Sequence
  Synthetic Oligonucleotide
tgaaggagatctatcagttcaagct

SEQ ID NO: 2500 - DNA, 25 bp, Artificial Sequence
  Synthetic Oligonucleotide
gcgtggaaattcaccgtgtttattt

SEQ ID NO: 2501 - DNA, 25 bp, Artificial Sequence
  Synthetic Oligonucleotide
gaaggaagatccaccgcgttgatga

SEQ ID NO: 2502 - DNA, 25 bp, Artificial Sequence
  Synthetic Oligonucleotide
tatttaaagcacacctaatgactga

SEQ ID NO: 2503 - DNA, 25 bp, Artificial Sequence
  Synthetic Oligonucleotide
tttgaagccgtccttggtcgatgat

SEQ ID NO: 2504 - DNA, 25 bp, Artificial Sequence
  Synthetic Oligonucleotide
gacgtacgcggccaccgtgcgatga

SEQ ID NO: 2505 - DNA, 25 bp, Artificial Sequence
  Synthetic Oligonucleotide
aacatcagccgttcacacgcgggca

SEQ ID NO: 2506 - DNA, 25 bp, Artificial Sequence
  Synthetic Oligonucleotide
accctgtgcctttctgtaaggtcag

SEQ ID NO: 2507 - DNA, 25 bp, Artificial Sequence
  Synthetic Oligonucleotide
cccgctgtccttcactatgaggtga

SEQ ID NO: 2508 - DNA, 25 bp, Artificial Sequence
  Synthetic Oligonucleotide
gaatctgtacgtaccgaattagaaa

SEQ ID NO: 2509 - DNA, 25 bp, Artificial Sequence
  Synthetic Oligonucleotide
gttaacttcttctaactcgtcgcca

SEQ ID NO: 2510 - DNA, 25 bp, Artificial Sequence
  Synthetic Oligonucleotide
tctatctctttaccacgcctgcgca

SEQ ID NO: 2511 - DNA, 25 bp, Artificial Sequence
  Synthetic Oligonucleotide
agtacccttattgcggcggcgtagc

SEQ ID NO: 2512 - DNA, 25 bp, Artificial Sequence
  Synthetic Oligonucleotide
tacgtccggctagtgttcaggcggc

SEQ ID NO: 2513 - DNA, 25 bp, Artificial Sequence
  Synthetic Oligonucleotide
agtgcccggcagtgttcgcgtggcc

SEQ ID NO: 2514 - DNA, 25 bp, Artificial Sequence
  Synthetic Oligonucleotide
gatgccgaaggaatttgccacctcg

SEQ ID NO: 2515 - DNA, 25 bp, Artificial Sequence
  Synthetic Oligonucleotide
gtaggagtgaaaaacgtggccattg

SEQ ID NO: 2516 - DNA, 25 bp, Artificial Sequence
  Synthetic Oligonucleotide
agaccttaaaactgtagaaccattg

SEQ ID NO: 2517 - DNA, 25 bp, Artificial Sequence
  Synthetic Oligonucleotide
aagacccttcaagttaatccttatg

SEQ ID NO: 2518 - DNA, 25 bp, Artificial Sequence
  Synthetic Oligonucleotide
accccgttgagagttaagcaacatc

SEQ ID NO: 2519 - DNA, 25 bp, Artificial Sequence
  Synthetic Oligonucleotide
aggccgttttttcagtgaagacata

SEQ ID NO: 2520 - DNA, 25 bp, Artificial Sequence
  Synthetic Oligonucleotide
tgacatttttctagtgagtcactta

SEQ ID NO: 2521 - DNA, 25 bp, Artificial Sequence
  Synthetic Oligonucleotide
gattcttgttacaacggtatatcta

SEQ ID NO: 2522 - DNA, 25 bp, Artificial Sequence
  Synthetic Oligonucleotide
tcaggttgttacatacgattgtcta

SEQ ID NO: 2523 - DNA, 25 bp, Artificial Sequence
  Synthetic Oligonucleotide
cgttccggtgagacggtgaatgtta

SEQ ID NO: 2524 - DNA, 25 bp, Artificial Sequence
  Synthetic Oligonucleotide
cgttccggtgagacggtgaatgtta

SEQ ID NO: 2525 - DNA, 25 bp, Artificial Sequence
  Synthetic Oligonucleotide
actcggagtagtggatgcatccgta

SEQ ID NO: 2526 - DNA, 25 bp, Artificial Sequence
  Synthetic Oligonucleotide
cgggatgagtagctcgagtgtcgta

SEQ ID NO: 2527 - DNA, 25 bp, Artificial Sequence
  Synthetic Oligonucleotide
gttcgcgagatggtgactcgattta

SEQ ID NO: 2528 - DNA, 25 bp, Artificial Sequence
  Synthetic Oligonucleotide
gtgcagcaacgagtcgaccagttga

SEQ ID NO: 2529 - DNA, 25 bp, Artificial Sequence
  Synthetic Oligonucleotide
agtcaccgtacttcgccaagtagta

SEQ ID NO: 2530 - DNA, 25 bp, Artificial Sequence
  Synthetic Oligonucleotide
gtagtcctaccatctcaagtgagta

SEQ ID NO: 2531 - DNA, 25 bp, Artificial Sequence
  Synthetic Oligonucleotide
gccgtccaaacggtcaacgtcgtta

SEQ ID NO: 2532 - DNA, 25 bp, Artificial Sequence
  Synthetic Oligonucleotide
ccaccagagtacttaaggtcgtcga

SEQ ID NO: 2533 - DNA, 25 bp, Artificial Sequence
  Synthetic Oligonucleotide
tacacttactcacgcaatgttatca

SEQ ID NO: 2534 - DNA, 25 bp, Artificial Sequence
  Synthetic Oligonucleotide
tttagtcttttacaacacagtttcc

SEQ ID NO: 2535 - DNA, 25 bp, Artificial Sequence
  Synthetic Oligonucleotide
ttacttttgtaagaaccgtttacga

SEQ ID NO: 2536 - DNA, 25 bp, Artificial Sequence
  Synthetic Oligonucleotide
ttacttttgcaggaaccgtttacga

SEQ ID NO: 2537 - DNA, 25 bp, Artificial Sequence
  Synthetic Oligonucleotide
gcttctcttcccagaacctcaggaa

SEQ ID NO: 2538 - DNA, 25 bp, Artificial Sequence
  Synthetic Oligonucleotide
cttccccaatggactcgactgagat

SEQ ID NO: 2539 - DNA, 25 bp, Artificial Sequence
  Synthetic Oligonucleotide
taccaccacttctgtggtcatctga

SEQ ID NO: 2540 - DNA, 25 bp, Artificial Sequence
  Synthetic Oligonucleotide
gtatcctcctctttcatggtactga

SEQ ID NO: 2541 - DNA, 25 bp, Artificial Sequence
  Synthetic Oligonucleotide
ttcttcacctattggtcgtttacga

SEQ ID NO: 2542 - DNA, 25 bp, Artificial Sequence
  Synthetic Oligonucleotide
gttgcgttcgaatactgggcgtgaa

SEQ ID NO: 2543 - DNA, 25 bp, Artificial Sequence
  Synthetic Oligonucleotide
ctttgtatcaactcggtggtgattc

SEQ ID NO: 2544 - DNA, 25 bp, Artificial Sequence
  Synthetic Oligonucleotide
tttgctatcgattatggcgtattct

SEQ ID NO: 2545 - DNA, 25 bp, Artificial Sequence
  Synthetic Oligonucleotide
ctcgagtgattgtaagtgggcttac

SEQ ID NO: 2546 - DNA, 25 bp, Artificial Sequence
  Synthetic Oligonucleotide
gtacaggtttagtggtggtccgaca

SEQ ID NO: 2547 - DNA, 25 bp, Artificial Sequence
  Synthetic Oligonucleotide
cgaccagcgtggtgaaggtccgctt

SEQ ID NO: 2548 - DNA, 25 bp, Artificial Sequence
  Synthetic Oligonucleotide
gtggggaatcggtgtcacttccctt

SEQ ID NO: 2549 - DNA, 25 bp, Artificial Sequence
  Synthetic Oligonucleotide
tccgggttggcgagccctcgaccga

SEQ ID NO: 2550 - DNA, 25 bp, Artificial Sequence
  Synthetic Oligonucleotide
accttgttgtggagccccgtggact

SEQ ID NO: 2551 - DNA, 25 bp, Artificial Sequence
  Synthetic Oligonucleotide
gaccttccgtagtgggcgccatggc

SEQ ID NO: 2552 - DNA, 25 bp, Artificial Sequence
  Synthetic Oligonucleotide
ctggttgactagtaggggccttgcc

SEQ ID NO: 2553 - DNA, 25 bp, Artificial Sequence
  Synthetic Oligonucleotide
tcgaatgaccggtggtgcctctgcc

SEQ ID NO: 2554 - DNA, 25 bp, Artificial Sequence
  Synthetic Oligonucleotide
gataggactccctttgaagccgtcc

SEQ ID NO: 2555 - DNA, 25 bp, Artificial Sequence
  Synthetic Oligonucleotide
aggacttgccatcgtagaactgctg

SEQ ID NO: 2556 - DNA, 25 bp, Artificial Sequence
  Synthetic Oligonucleotide
cagcagttctacgatggcaagtcct

SEQ ID NO: 2557 - DNA, 25 bp, Artificial Sequence
  Synthetic Oligonucleotide
ctcacccaagcctggaggtcagtca

SEQ ID NO: 2558 - DNA, 25 bp, Artificial Sequence
  Synthetic Oligonucleotide
cccctagaaccgattgggctaacac

SEQ ID NO: 2559 - DNA, 25 bp, Artificial Sequence
  Synthetic Oligonucleotide
acctcatcttcaattgaggcctacc

SEQ ID NO: 2560 - DNA, 25 bp, Artificial Sequence
  Synthetic Oligonucleotide
ctaaatttcaccagagtaaggttaa

SEQ ID NO: 2561 - DNA, 25 bp, Artificial Sequence
  Synthetic Oligonucleotide
tgagtctaaccatcgtgaaatttaa

SEQ ID NO: 2562 - DNA, 25 bp, Artificial Sequence
  Synthetic Oligonucleotide
tcgagcgcctcagggcacctattta

SEQ ID NO: 2563 - DNA, 25 bp, Artificial Sequence
  Synthetic Oligonucleotide
tcggaactgacagggcaacttgaac

SEQ ID NO: 2564 - DNA, 25 bp, Artificial Sequence
  Synthetic Oligonucleotide
taccgcctgaaaaggcactgtcgcc

SEQ ID NO: 2565 - DNA, 25 bp, Artificial Sequence
  Synthetic Oligonucleotide
ccgccggaccacagggtcaagctgt

SEQ ID NO: 2566 - DNA, 25 bp, Artificial Sequence
  Synthetic Oligonucleotide
ctacccgtgccgtagttgcatcctg

SEQ ID NO: 2567 - DNA, 25 bp, Artificial Sequence
  Synthetic Oligonucleotide
aagtcctgcacgtggtccaacgcgc

SEQ ID NO: 2568 - DNA, 25 bp, Artificial Sequence
  Synthetic Oligonucleotide
aaggctggtactctggccacaccgc

SEQ ID NO: 2569 - DNA, 25 bp, Artificial Sequence
  Synthetic Oligonucleotide
actgctggctgatggcctaaccgcg

SEQ ID NO: 2570 - DNA, 25 bp, Artificial Sequence
  Synthetic Oligonucleotide
acggctggaagatccacgcaaatcg

SEQ ID NO: 2571 - DNA, 25 bp, Artificial Sequence
  Synthetic Oligonucleotide
tacggctggaagtaccacgcaaatc

SEQ ID NO: 2572 - DNA, 25 bp, Artificial Sequence
  Synthetic Oligonucleotide
ctgtttttagaaactcggaaaatct

SEQ ID NO: 2573 - DNA, 25 bp, Artificial Sequence
  Synthetic Oligonucleotide
cggttttcagagaatccgaaacttg

SEQ ID NO: 2574 - DNA, 25 bp, Artificial Sequence
  Synthetic Oligonucleotide
ctttcttggaggaaaggaaacctac

SEQ ID NO: 2575 - DNA, 25 bp, Artificial Sequence
  Synthetic Oligonucleotide
tactggaacgggagtcggaaccgtc

SEQ ID NO: 2576 - DNA, 25 bp, Artificial Sequence
  Synthetic Oligonucleotide
tactggaacgggagtcggaaccgtc

SEQ ID NO: 2577 - DNA, 25 bp, Artificial Sequence
  Synthetic Oligonucleotide
tactggaacgggagtcggaaccgtc

SEQ ID NO: 2578 - DNA, 25 bp, Artificial Sequence
  Synthetic Oligonucleotide
tgccaacaggtgagtctgagaccgg

SEQ ID NO: 2579 - DNA, 25 bp, Artificial Sequence
  Synthetic Oligonucleotide
ccgcctctactagtgggcaaaccga

SEQ ID NO: 2580 - DNA, 25 bp, Artificial Sequence
  Synthetic Oligonucleotide
ctagggccgtagggcgtgaaaaagg

SEQ ID NO: 2581 - DNA, 25 bp, Artificial Sequence
  Synthetic Oligonucleotide
gcacggccacggaccagaagatgcg

SEQ ID NO: 2582 - DNA, 25 bp, Artificial Sequence
  Synthetic Oligonucleotide
caaccgccggagcacttggaaccgg

SEQ ID NO: 2583 - DNA, 25 bp, Artificial Sequence
  Synthetic Oligonucleotide
taacagcacgggtacatcattaccc

SEQ ID NO: 2584 - DNA, 25 bp, Artificial Sequence
  Synthetic Oligonucleotide
agagacaactggtaacccaactccc

SEQ ID NO: 2585 - DNA, 25 bp, Artificial Sequence
  Synthetic Oligonucleotide
agtaccctaaagcatcctgacctca

SEQ ID NO: 2586 - DNA, 25 bp, Artificial Sequence
  Synthetic Oligonucleotide
agaagtcctcatcctaaatgattca

SEQ ID NO: 2587 - DNA, 25 bp, Artificial Sequence
  Synthetic Oligonucleotide
ggaggtccaccctaagtagaagacc

SEQ ID NO: 2588 - DNA, 25 bp, Artificial Sequence
  Synthetic Oligonucleotide
aggggtccgccacctgaatagcgca

SEQ ID NO: 2589 - DNA, 25 bp, Artificial Sequence
  Synthetic Oligonucleotide
acggaaggaaccaacaccatcggca

SEQ ID NO: 2590 - DNA, 25 bp, Artificial Sequence
  Synthetic Oligonucleotide
gagcgcgagccgtcaccagtgcttc

SEQ ID NO: 2591 - DNA, 25 bp, Artificial Sequence
  Synthetic Oligonucleotide
cgagaggagggatacaacaggtatc

SEQ ID NO: 2592 - DNA, 25 bp, Artificial Sequence
  Synthetic Oligonucleotide
gataaggaaggagacctaaaagtgc

SEQ ID NO: 2593 - DNA, 25 bp, Artificial Sequence
  Synthetic Oligonucleotide
taatttagagacgcgcaaaaggtct

SEQ ID NO: 2594 - DNA, 25 bp, Artificial Sequence
  Synthetic Oligonucleotide
gcgcattaggccccgagtaatggtt

SEQ ID NO: 2595 - DNA, 25 bp, Artificial Sequence
  Synthetic Oligonucleotide
cccattaaacgcccggacgacggaa

SEQ ID NO: 2596 - DNA, 25 bp, Artificial Sequence
  Synthetic Oligonucleotide
caaatgaacctgcagacggagtaga

SEQ ID NO: 2597 - DNA, 25 bp, Artificial Sequence
  Synthetic Oligonucleotide
tgcaatggcactacttaggtatagg

SEQ ID NO: 2598 - DNA, 25 bp, Artificial Sequence
  Synthetic Oligonucleotide
ctccatgtggtcacccgtggtctgc

SEQ ID NO: 2599 - DNA, 25 bp, Artificial Sequence
  Synthetic Oligonucleotide
ctactactgggctaaccgaggtggg

SEQ ID NO: 2600 - DNA, 25 bp, Artificial Sequence
  Synthetic Oligonucleotide
tcaagaggcgcctgaacccgtggag

SEQ ID NO: 2601 - DNA, 25 bp, Artificial Sequence
  Synthetic Oligonucleotide
gaaaaagtctaacaccccgtcgaga

SEQ ID NO: 2602 - DNA, 25 bp, Artificial Sequence
  Synthetic Oligonucleotide
gtagaataagtcaaggtttccttgc

SEQ ID NO: 2603 - DNA, 25 bp, Artificial Sequence
  Synthetic Oligonucleotide
ataaaaagtcaacggaatctacttc

SEQ ID NO: 2604 - DNA, 25 bp, Artificial Sequence
  Synthetic Oligonucleotide
gcaaaataagagacgtatctgtttc

SEQ ID NO: 2605 - DNA, 25 bp, Artificial Sequence
  Synthetic Oligonucleotide
agtgaaaattaaccacacatgaatc

SEQ ID NO: 2606 - DNA, 25 bp, Artificial Sequence
  Synthetic Oligonucleotide
atcttaatttagcacacaaggtttc

SEQ ID NO: 2607 - DNA, 25 bp, Artificial Sequence
  Synthetic Oligonucleotide
tactactttgcttacatgtcgaata

SEQ ID NO: 2608 - DNA, 25 bp, Artificial Sequence
  Synthetic Oligonucleotide
ggaacaccggcatgaggtcgagtta

SEQ ID NO: 2609 - DNA, 25 bp, Artificial Sequence
  Synthetic Oligonucleotide
acgacgactggcggtggctgttata

SEQ ID NO: 2610 - DNA, 25 bp, Artificial Sequence
  Synthetic Oligonucleotide
acgattggtcgctgacctgttgtac

SEQ ID NO: 2611 - DNA, 25 bp, Artificial Sequence
  Synthetic Oligonucleotide
aatggtttggtcggaccgtgttaac

SEQ ID NO: 2612 - DNA, 25 bp, Artificial Sequence
  Synthetic Oligonucleotide
acagtgggcctgcagccgtcgaaac

SEQ ID NO: 2613 - DNA, 25 bp, Artificial Sequence
  Synthetic Oligonucleotide
cacgtaggggctcctgactcccgga

SEQ ID NO: 2614 - DNA, 25 bp, Artificial Sequence
  Synthetic Oligonucleotide
ggatatgggttttagctgctagcta

SEQ ID NO: 2615 - DNA, 25 bp, Artificial Sequence
  Synthetic Oligonucleotide
ttgtgcctcgggagttggtcccgcc

SEQ ID NO: 2616 - DNA, 25 bp, Artificial Sequence
  Synthetic Oligonucleotide
gtgcctcggactgttggttcacctc

SEQ ID NO: 2617 - DNA, 25 bp, Artificial Sequence
  Synthetic Oligonucleotide
gtgcctctgcctggtggttcacttc

SEQ ID NO: 2618 - DNA, 25 bp, Artificial Sequence
  Synthetic Oligonucleotide
tgccggaaccgtggaggtcaccttc

SEQ ID NO: 2619 - DNA, 25 bp, Artificial Sequence
  Synthetic Oligonucleotide
gcgagcgcccggaagtcgtcccata

SEQ ID NO: 2620 - DNA, 25 bp, Artificial Sequence
  Synthetic Oligonucleotide
tcgatacccaggacttgtaccacac

SEQ ID NO: 2621 - DNA, 25 bp, Artificial Sequence
  Synthetic Oligonucleotide
tagctccgcaagcactattcacgca

SEQ ID NO: 2622 - DNA, 25 bp, Artificial Sequence
  Synthetic Oligonucleotide
atggtccaagggataatccgtacta

SEQ ID NO: 2623 - DNA, 25 bp, Artificial Sequence
  Synthetic Oligonucleotide
attccagaccctaagacccgtacga

SEQ ID NO: 2624 - DNA, 25 bp, Artificial Sequence
  Synthetic Oligonucleotide
cgatggagaacctttccccgtcgat

SEQ ID NO: 2625 - DNA, 25 bp, Artificial Sequence
  Synthetic Oligonucleotide
tgaaggagatctttcagttcaagct

SEQ ID NO: 2626 - DNA, 25 bp, Artificial Sequence
  Synthetic Oligonucleotide
gcgtggaaattctccgtgtttattt

SEQ ID NO: 2627 - DNA, 25 bp, Artificial Sequence
  Synthetic Oligonucleotide
gaaggaagatcctccgcgttgatga

SEQ ID NO: 2628 - DNA, 25 bp, Artificial Sequence
  Synthetic Oligonucleotide
tatttaaagcactcctaatgactga

SEQ ID NO: 2629 - DNA, 25 bp, Artificial Sequence
  Synthetic Oligonucleotide
tttgaagccgtcgttggtcgatgat

SEQ ID NO: 2630 - DNA, 25 bp, Artificial Sequence
  Synthetic Oligonucleotide
gacgtacgcggcgaccgtgcgatga

SEQ ID NO: 2631 - DNA, 25 bp, Artificial Sequence
  Synthetic Oligonucleotide
aacatcagccgtacacacgcgggca

SEQ ID NO: 2632 - DNA, 25 bp, Artificial Sequence
  Synthetic Oligonucleotide
accctgtgccttactgtaaggtcag

SEQ ID NO: 2633 - DNA, 25 bp, Artificial Sequence
  Synthetic Oligonucleotide
cccgctgtccttgactatgaggtga

SEQ ID NO: 2634 - DNA, 25 bp, Artificial Sequence
  Synthetic Oligonucleotide
gaatctgtacgttccgaattagaaa

SEQ ID NO: 2635 - DNA, 25 bp, Artificial Sequence
  Synthetic Oligonucleotide
gttaacttcttcaaactcgtcgcca

SEQ ID NO: 2636 - DNA, 25 bp, Artificial Sequence
  Synthetic Oligonucleotide
tctatctctttagcacgcctgcgca

SEQ ID NO: 2637 - DNA, 25 bp, Artificial Sequence
  Synthetic Oligonucleotide
agtacccttattccggcggcgtagc

SEQ ID NO: 2638 - DNA, 25 bp, Artificial Sequence
  Synthetic Oligonucleotide
tacgtccggctactgttcaggcggc

SEQ ID NO: 2639 - DNA, 25 bp, Artificial Sequence
  Synthetic Oligonucleotide
agtgcccggcagagttcgcgtggcc

SEQ ID NO: 2640 - DNA, 25 bp, Artificial Sequence
  Synthetic Oligonucleotide
gatgccgaaggattttgccacctcg

SEQ ID NO: 2641 - DNA, 25 bp, Artificial Sequence
  Synthetic Oligonucleotide
gtaggagtgaaatacgtggccattg

SEQ ID NO: 2642 - DNA, 25 bp, Artificial Sequence
  Synthetic Oligonucleotide
agaccttaaaacagtagaaccattg

SEQ ID NO: 2643 - DNA, 25 bp, Artificial Sequence
  Synthetic Oligonucleotide
aagacccttcaacttaatccttatg

SEQ ID NO: 2644 - DNA, 25 bp, Artificial Sequence
  Synthetic Oligonucleotide
accccgttgagacttaagcaacatc

SEQ ID NO: 2645 - DNA, 25 bp, Artificial Sequence
  Synthetic Oligonucleotide
aggccgttttttgagtgaagacata

SEQ ID NO: 2646 - DNA, 25 bp, Artificial Sequence
  Synthetic Oligonucleotide
tgacatttttcttgtgagtcactta

SEQ ID NO: 2647 - DNA, 25 bp, Artificial Sequence
  Synthetic Oligonucleotide
gattcttgttactacggtatatcta

SEQ ID NO: 2648 - DNA, 25 bp, Artificial Sequence
  Synthetic Oligonucleotide
tcaggttgttacttacgattgtcta

SEQ ID NO: 2649 - DNA, 25 bp, Artificial Sequence
  Synthetic Oligonucleotide
cgttccggtgagtcggtgaatgtta

SEQ ID NO: 2650 - DNA, 25 bp, Artificial Sequence
  Synthetic Oligonucleotide
cgttccggtgagtcggtgaatgtta

SEQ ID NO: 2651 - DNA, 25 bp, Artificial Sequence
  Synthetic Oligonucleotide
actcggagtagtcgatgcatccgta

SEQ ID NO: 2652 - DNA, 25 bp, Artificial Sequence
  Synthetic Oligonucleotide
cgggatgagtaggtcgagtgtcgta

SEQ ID NO: 2653 - DNA, 25 bp, Artificial Sequence
  Synthetic Oligonucleotide
gttcgcgagatgctgactcgattta

SEQ ID NO: 2654 - DNA, 25 bp, Artificial Sequence
  Synthetic Oligonucleotide
gtgcagcaacgactcgaccagttga

SEQ ID NO: 2655 - DNA, 25 bp, Artificial Sequence
  Synthetic Oligonucleotide
agtcaccgtactacgccaagtagta

SEQ ID NO: 2656 - DNA, 25 bp, Artificial Sequence
  Synthetic Oligonucleotide
gtagtcctaccaactcaagtgagta

SEQ ID NO: 2657 - DNA, 25 bp, Artificial Sequence
  Synthetic Oligonucleotide
gccgtccaaacgctcaacgtcgtta

SEQ ID NO: 2658 - DNA, 25 bp, Artificial Sequence
  Synthetic Oligonucleotide
ccaccagagtacataaggtcgtcga

SEQ ID NO: 2659 - DNA, 25 bp, Artificial Sequence
  Synthetic Oligonucleotide
tacacttactcaggcaatgttatca

SEQ ID NO: 2660 - DNA, 25 bp, Artificial Sequence
  Synthetic Oligonucleotide
tttagtcttttagaacacagtttcc

SEQ ID NO: 2661 - DNA, 25 bp, Artificial Sequence
  Synthetic Oligonucleotide
ttacttttgtaacaaccgtttacga

SEQ ID NO: 2662 - DNA, 25 bp, Artificial Sequence
  Synthetic Oligonucleotide
ttacttttgcagcaaccgtttacga

SEQ ID NO: 2663 - DNA, 25 bp, Artificial Sequence
  Synthetic Oligonucleotide
gcttctcttccctgaacctcaggaa

SEQ ID NO: 2664 - DNA, 25 bp, Artificial Sequence
  Synthetic Oligonucleotide
cttccccaatggtctcgactgagat

SEQ ID NO: 2665 - DNA, 25 bp, Artificial Sequence
  Synthetic Oligonucleotide
taccaccacttcagtggtcatctga

SEQ ID NO: 2666 - DNA, 25 bp, Artificial Sequence
  Synthetic Oligonucleotide
gtatcctcctctatcatggtactga

SEQ ID NO: 2667 - DNA, 25 bp, Artificial Sequence
  Synthetic Oligonucleotide
ttcttcacctataggtcgtttacga

SEQ ID NO: 2668 - DNA, 25 bp, Artificial Sequence
  Synthetic Oligonucleotide
gttgcgttcgaaaactgggcgtgaa

SEQ ID NO: 2669 - DNA, 25 bp, Artificial Sequence
  Synthetic Oligonucleotide
ctttgtatcaacacggtggtgattc

SEQ ID NO: 2670 - DNA, 25 bp, Artificial Sequence
  Synthetic Oligonucleotide
tttgctatcgataatggcgtattct

SEQ ID NO: 2671 - DNA, 25 bp, Artificial Sequence
  Synthetic Oligonucleotide
ctcgagtgattgaaagtgggcttac

SEQ ID NO: 2672 - DNA, 25 bp, Artificial Sequence
  Synthetic Oligonucleotide
gtacaggtttagaggtggtccgaca

SEQ ID NO: 2673 - DNA, 25 bp, Artificial Sequence
  Synthetic Oligonucleotide
cgaccagcgtggagaaggtccgctt

SEQ ID NO: 2674 - DNA, 25 bp, Artificial Sequence
  Synthetic Oligonucleotide
gtggggaatcggagtcacttccctt

SEQ ID NO: 2675 - DNA, 25 bp, Artificial Sequence
  Synthetic Oligonucleotide
tccgggttggcgtgccctcgaccga

SEQ ID NO: 2676 - DNA, 25 bp, Artificial Sequence
  Synthetic Oligonucleotide
accttgttgtggtgccccgtggact

SEQ ID NO: 2677 - DNA, 25 bp, Artificial Sequence
  Synthetic Oligonucleotide
gaccttccgtagagggcgccatggc

SEQ ID NO: 2678 - DNA, 25 bp, Artificial Sequence
  Synthetic Oligonucleotide
ctggttgactagaaggggccttgcc

SEQ ID NO: 2679 - DNA, 25 bp, Artificial Sequence
  Synthetic Oligonucleotide
tcgaatgaccggaggtgcctctgcc

SEQ ID NO: 2680 - DNA, 25 bp, Artificial Sequence
  Synthetic Oligonucleotide
gataggactcccattgaagccgtcc

SEQ ID NO: 2681 - DNA, 25 bp, Artificial Sequence
  Synthetic Oligonucleotide
cagcagttctacgatggcaagtcct

SEQ ID NO: 2682 - DNA, 25 bp, Artificial Sequence
  Synthetic Oligonucleotide
aggacttgccatcgtagaactgctg

SEQ ID NO: 2683 - DNA, 25 bp, Artificial Sequence
  Synthetic Oligonucleotide
cctcagtataaatgggagatcctta

SEQ ID NO: 2684 - DNA, 25 bp, Artificial Sequence
  Synthetic Oligonucleotide
cccaatataagacgtaatgcccgta

SEQ ID NO: 2685 - DNA, 25 bp, Artificial Sequence
  Synthetic Oligonucleotide
acctcaacttccatcaaagcaccta

SEQ ID NO: 2686 - DNA, 25 bp, Artificial Sequence
  Synthetic Oligonucleotide
accgcatgtccagaaacgcctacag

SEQ ID NO: 2687 - DNA, 25 bp, Artificial Sequence
  Synthetic Oligonucleotide
gtcatatccttctgtaacggacttc

SEQ ID NO: 2688 - DNA, 25 bp, Artificial Sequence
  Synthetic Oligonucleotide
agtcatagtcaggtccaccagcgga

SEQ ID NO: 2689 - DNA, 25 bp, Artificial Sequence
  Synthetic Oligonucleotide
tactagcatgaagagcaccaactga

SEQ ID NO: 2690 - DNA, 25 bp, Artificial Sequence
  Synthetic Oligonucleotide
gacccagtagaagagcgccaaccgg

SEQ ID NO: 2691 - DNA, 25 bp, Artificial Sequence
  Synthetic Oligonucleotide
cgccataaatcatcggtacaacagg

SEQ ID NO: 2692 - DNA, 25 bp, Artificial Sequence
  Synthetic Oligonucleotide
gcgggtgaagcattggtaactactg

SEQ ID NO: 2693 - DNA, 25 bp, Artificial Sequence
  Synthetic Oligonucleotide
gtgggtcaaaagttcgtaaacacta

SEQ ID NO: 2694 - DNA, 25 bp, Artificial Sequence
  Synthetic Oligonucleotide
gtgtggcacacgtaagcattacaga

SEQ ID NO: 2695 - DNA, 25 bp, Artificial Sequence
  Synthetic Oligonucleotide
attgggacgccctacaccataagga

SEQ ID NO: 2696 - DNA, 25 bp, Artificial Sequence
  Synthetic Oligonucleotide
ttcaggagccggtgtaacacttgaa

SEQ ID NO: 2697 - DNA, 25 bp, Artificial Sequence
  Synthetic Oligonucleotide
ggtcggcccgggtaacaacttgcac

SEQ ID NO: 2698 - DNA, 25 bp, Artificial Sequence
  Synthetic Oligonucleotide
ggtcggcccgggtatcacaaattcg

SEQ ID NO: 2699 - DNA, 25 bp, Artificial Sequence
  Synthetic Oligonucleotide
ggtccctctggttttcggaagtatg

SEQ ID NO: 2700 - DNA, 25 bp, Artificial Sequence
  Synthetic Oligonucleotide
gggcccttgcataagtggcatcgta

SEQ ID NO: 2701 - DNA, 25 bp, Artificial Sequence
  Synthetic Oligonucleotide
gggcccttgcataagtggcactgta

SEQ ID NO: 2702 - DNA, 25 bp, Artificial Sequence
  Synthetic Oligonucleotide
gccctgttgtagagtagccggagta

SEQ ID NO: 2703 - DNA, 25 bp, Artificial Sequence
  Synthetic Oligonucleotide
aactccccagggaggctacggacga

SEQ ID NO: 2704 - DNA, 25 bp, Artificial Sequence
  Synthetic Oligonucleotide
ggtctccccggcaggtgccagaaga

SEQ ID NO: 2705 - DNA, 25 bp, Artificial Sequence
  Synthetic Oligonucleotide
tcactgcctggtggacggctgaaga

SEQ ID NO: 2706 - DNA, 25 bp, Artificial Sequence
  Synthetic Oligonucleotide
tctattgcgtggactggataggagg

SEQ ID NO: 2707 - DNA, 25 bp, Artificial Sequence
  Synthetic Oligonucleotide
ttaaacgcgcggacgacggaaggaa

SEQ ID NO: 2708 - DNA, 25 bp, Artificial Sequence
  Synthetic Oligonucleotide
ctaagaccccgtcgagaaaaataca

SEQ ID NO: 2709 - DNA, 25 bp, Artificial Sequence
  Synthetic Oligonucleotide
caaaactctaggtgtaaacaacctt

SEQ ID NO: 2710 - DNA, 25 bp, Artificial Sequence
  Synthetic Oligonucleotide
gaaaagtgtaagaccgagacagccc

SEQ ID NO: 2711 - DNA, 25 bp, Artificial Sequence
  Synthetic Oligonucleotide
gaagacctacaacatcagccggtcc

SEQ ID NO: 2712 - DNA, 25 bp, Artificial Sequence
  Synthetic Oligonucleotide
gaagacctacaacatcagccgttca

SEQ ID NO: 2713 - DNA, 25 bp, Artificial Sequence
  Synthetic Oligonucleotide
taaaaggcaaaagtaagtctttcac

SEQ ID NO: 2714 - DNA, 25 bp, Artificial Sequence
  Synthetic Oligonucleotide
acaggcaccaacgtagaacacgaaa

SEQ ID NO: 2715 - DNA, 25 bp, Artificial Sequence
  Synthetic Oligonucleotide
gaccaggcccccttacggaaggaac

SEQ ID NO: 2716 - DNA, 25 bp, Artificial Sequence
  Synthetic Oligonucleotide
tcaagtcgcccatgaggatggacta

SEQ ID NO: 2717 - DNA, 25 bp, Artificial Sequence
  Synthetic Oligonucleotide
tcaagtggccgttgtggcagtcgaa

SEQ ID NO: 2718 - DNA, 25 bp, Artificial Sequence
  Synthetic Oligonucleotide
cgcaagtggcatctacgagaatgga

SEQ ID NO: 2719 - DNA, 25 bp, Artificial Sequence
  Synthetic Oligonucleotide
tccacaaggggctcgcgaagatgca

SEQ ID NO: 2720 - DNA, 25 bp, Artificial Sequence
  Synthetic Oligonucleotide
taccagaggctctcggaaaggtaca

SEQ ID NO: 2721 - DNA, 25 bp, Artificial Sequence
  Synthetic Oligonucleotide
acgaggcgactctcggcaaggtata

SEQ ID NO: 2722 - DNA, 25 bp, Artificial Sequence
  Synthetic Oligonucleotide
acaagcgatagccagagagcggtta

SEQ ID NO: 2723 - DNA, 25 bp, Artificial Sequence
  Synthetic Oligonucleotide
gaaaggtctccccggtaggtgtcag

SEQ ID NO: 2724 - DNA, 25 bp, Artificial Sequence
  Synthetic Oligonucleotide
gaccacggatcccgccgggtgctac

SEQ ID NO: 2725 - DNA, 25 bp, Artificial Sequence
  Synthetic Oligonucleotide
ggaccaggagtcacatcgggtccta

SEQ ID NO: 2726 - DNA, 25 bp, Artificial Sequence
  Synthetic Oligonucleotide
cgcccagggcatgaacggctgctac

SEQ ID NO: 2727 - DNA, 25 bp, Artificial Sequence
  Synthetic Oligonucleotide
cgccaccggtagagcaagagcttca

SEQ ID NO: 2728 - DNA, 25 bp, Artificial Sequence
  Synthetic Oligonucleotide
aattaacacgggagcaaagctctaa

SEQ ID NO: 2729 - DNA, 25 bp, Artificial Sequence
  Synthetic Oligonucleotide
attacgaaatggtcgaaattcttac

SEQ ID NO: 2730 - DNA, 25 bp, Artificial Sequence
  Synthetic Oligonucleotide
tagtaaggtgggttctaactgccta

SEQ ID NO: 2731 - DNA, 25 bp, Artificial Sequence
  Synthetic Oligonucleotide
gctcgtaatttgaatctaatcccga

SEQ ID NO: 2732 - DNA, 25 bp, Artificial Sequence
  Synthetic Oligonucleotide
gattaagtcgttgaaccaaaacttc

SEQ ID NO: 2733 - DNA, 25 bp, Artificial Sequence
  Synthetic Oligonucleotide
tttaggtttaaaacactaagatata

SEQ ID NO: 2734 - DNA, 25 bp, Artificial Sequence
  Synthetic Oligonucleotide
cttctttaaataccgtaacgcgtta

SEQ ID NO: 2735 - DNA, 25 bp, Artificial Sequence
  Synthetic Oligonucleotide
cttagttagtgtttcggcagttgta

SEQ ID NO: 2736 - DNA, 25 bp, Artificial Sequence
  Synthetic Oligonucleotide
tcggtttaagggttgctcggctaga

SEQ ID NO: 2737 - DNA, 25 bp, Artificial Sequence
  Synthetic Oligonucleotide
atgctggacagggccccggcgtagc

SEQ ID NO: 2738 - DNA, 25 bp, Artificial Sequence
  Synthetic Oligonucleotide
acatggccatgtgctacgccggggc

SEQ ID NO: 2739 - DNA, 25 bp, Artificial Sequence
  Synthetic Oligonucleotide
ccattggcattcctcggtcggcgga

SEQ ID NO: 2740 - DNA, 25 bp, Artificial Sequence
  Synthetic Oligonucleotide
atcaggcggttccacgccggtagga

SEQ ID NO: 2741 - DNA, 25 bp, Artificial Sequence
  Synthetic Oligonucleotide
gatgaccggtcgaaactcagtagga

SEQ ID NO: 2742 - DNA, 25 bp, Artificial Sequence
  Synthetic Oligonucleotide
gggttatgccggtttaggcaactga

SEQ ID NO: 2743 - DNA, 25 bp, Artificial Sequence
  Synthetic Oligonucleotide
gtagttttgcgctctaggtgaatgc

SEQ ID NO: 2744 - DNA, 25 bp, Artificial Sequence
  Synthetic Oligonucleotide
cattgttgaccacagatgatatgtc

SEQ ID NO: 2745 - DNA, 25 bp, Artificial Sequence
  Synthetic Oligonucleotide
aagcgatagccagagagcggttata

SEQ ID NO: 2746 - DNA, 25 bp, Artificial Sequence
  Synthetic Oligonucleotide
agaagttccccagatgtaccgttga

SEQ ID NO: 2747 - DNA, 25 bp, Artificial Sequence
  Synthetic Oligonucleotide
atcaggtcccgctacatcctttcga

SEQ ID NO: 2748 - DNA, 25 bp, Artificial Sequence
  Synthetic Oligonucleotide
cgccgagcccggacgaaacttgtga

SEQ ID NO: 2749 - DNA, 25 bp, Artificial Sequence
  Synthetic Oligonucleotide
cgccgagcccggacgaaacttgtga

SEQ ID NO: 2750 - DNA, 25 bp, Artificial Sequence
  Synthetic Oligonucleotide
cctaggcaacagctggtgatttcga

SEQ ID NO: 2751 - DNA, 25 bp, Artificial Sequence
  Synthetic Oligonucleotide
ctactgggaaagttgctgtcccagc

SEQ ID NO: 2752 - DNA, 25 bp, Artificial Sequence
  Synthetic Oligonucleotide
ctcgggaacatcacctcgccgaagg

SEQ ID NO: 2753 - DNA, 25 bp, Artificial Sequence
  Synthetic Oligonucleotide
tctggggacatcattctcctgaaga

SEQ ID NO: 2754 - DNA, 25 bp, Artificial Sequence
  Synthetic Oligonucleotide
tactgtgaagatacctcaaatgaaa

SEQ ID NO: 2755 - DNA, 25 bp, Artificial Sequence
  Synthetic Oligonucleotide
cttgaagggtcttcagaactcaaga

SEQ ID NO: 2756 - DNA, 25 bp, Artificial Sequence
  Synthetic Oligonucleotide
ttggactggtcgaacgggtccatga

SEQ ID NO: 2757 - DNA, 25 bp, Artificial Sequence
  Synthetic Oligonucleotide
ggtccctgctcgaacttcgccggca

SEQ ID NO: 2758 - DNA, 25 bp, Artificial Sequence
  Synthetic Oligonucleotide
gtccctgctcgaacttcgccggcac

SEQ ID NO: 2759 - DNA, 25 bp, Artificial Sequence
  Synthetic Oligonucleotide
cgtccctgcattagttgcgttcgac

SEQ ID NO: 2760 - DNA, 25 bp, Artificial Sequence
  Synthetic Oligonucleotide
ctcacctgacatcagtattctggga

SEQ ID NO: 2761 - DNA, 25 bp, Artificial Sequence
  Synthetic Oligonucleotide
ctctagtctgctctagcccgcgcaa

SEQ ID NO: 2762 - DNA, 25 bp, Artificial Sequence
  Synthetic Oligonucleotide
acgtctacttcttgaccctcggcaa

SEQ ID NO: 2763 - DNA, 25 bp, Artificial Sequence
  Synthetic Oligonucleotide
tttactcttcggtgctcccggggac

SEQ ID NO: 2764 - DNA, 25 bp, Artificial Sequence
  Synthetic Oligonucleotide
tcttccaccgtggttccgcgaggga

SEQ ID NO: 2765 - DNA, 25 bp, Artificial Sequence
  Synthetic Oligonucleotide
ggtgccctaaaggagtcccaaggac

SEQ ID NO: 2766 - DNA, 25 bp, Artificial Sequence
  Synthetic Oligonucleotide
gttccgacaagagtattcccaacct

SEQ ID NO: 2767 - DNA, 25 bp, Artificial Sequence
  Synthetic Oligonucleotide
cggttgaccaaagacttgtcgcaaa

SEQ ID NO: 2768 - DNA, 25 bp, Artificial Sequence
  Synthetic Oligonucleotide
gtctaattatattcactttcggaaa

SEQ ID NO: 2769 - DNA, 25 bp, Artificial Sequence
  Synthetic Oligonucleotide
gacacttaaatcgtcgtttgggcta

SEQ ID NO: 2770 - DNA, 25 bp, Artificial Sequence
  Synthetic Oligonucleotide
gacctaaaagacgttcggtccccta

SEQ ID NO: 2771 - DNA, 25 bp, Artificial Sequence
  Synthetic Oligonucleotide
ggctaggaaggcttcggcaactaag

SEQ ID NO: 2772 - DNA, 25 bp, Artificial Sequence
  Synthetic Oligonucleotide
tgctggaccggcttctgctgcacga

SEQ ID NO: 2773 - DNA, 25 bp, Artificial Sequence
  Synthetic Oligonucleotide
ccttggcgagcaacggttatcacta

SEQ ID NO: 2774 - DNA, 25 bp, Artificial Sequence
  Synthetic Oligonucleotide
gtctttagcttctcgcgtaagccta

SEQ ID NO: 2775 - DNA, 25 bp, Artificial Sequence
  Synthetic Oligonucleotide
ttcttcttatgtcgtaaacgtacta

SEQ ID NO: 2776 - DNA, 25 bp, Artificial Sequence
  Synthetic Oligonucleotide
ttctttctcgagagtcagacagtta

SEQ ID NO: 2777 - DNA, 25 bp, Artificial Sequence
  Synthetic Oligonucleotide
tgtctcttgtcgtacagccgaagca

SEQ ID NO: 2778 - DNA, 25 bp, Artificial Sequence
  Synthetic Oligonucleotide
ttgtccaggtacacgggcgacagca

SEQ ID NO: 2779 - DNA, 25 bp, Artificial Sequence
  Synthetic Oligonucleotide
atggccagttacccggcgcgcttta

SEQ ID NO: 2780 - DNA, 25 bp, Artificial Sequence
  Synthetic Oligonucleotide
gggccaggagcccgtcctacgctta

SEQ ID NO: 2781 - DNA, 25 bp, Artificial Sequence
  Synthetic Oligonucleotide
tccgatcggtaaacggtcccggtta

SEQ ID NO: 2782 - DNA, 25 bp, Artificial Sequence
  Synthetic Oligonucleotide
ctttacgcgtactagctgccgtgga

SEQ ID NO: 2783 - DNA, 25 bp, Artificial Sequence
  Synthetic Oligonucleotide
ttccgtgaccgagaagtgccgggta

SEQ ID NO: 2784 - DNA, 25 bp, Artificial Sequence
  Synthetic Oligonucleotide
tccgtcaccgagtaagttgatgaga

SEQ ID NO: 2785 - DNA, 25 bp, Artificial Sequence
  Synthetic Oligonucleotide
gtactccattagtcattctagtgca

SEQ ID NO: 2786 - DNA, 25 bp, Artificial Sequence
  Synthetic Oligonucleotide
cttgcgatctcggacaaaacgtgca

SEQ ID NO: 2787 - DNA, 25 bp, Artificial Sequence
  Synthetic Oligonucleotide
tacaaccggtccgaccagaacttga

SEQ ID NO: 2788 - DNA, 25 bp, Artificial Sequence
  Synthetic Oligonucleotide
tatatcagaaccgacagggtcttga

SEQ ID NO: 2789 - DNA, 25 bp, Artificial Sequence
  Synthetic Oligonucleotide
tttcaccagcaactcccgttacggt

SEQ ID NO: 2790 - DNA, 25 bp, Artificial Sequence
  Synthetic Oligonucleotide
tgtcccacaagaagaccccgttgag

SEQ ID NO: 2791 - DNA, 25 bp, Artificial Sequence
  Synthetic Oligonucleotide
tcgtaccccttgtgagacccgggac

SEQ ID NO: 2792 - DNA, 25 bp, Artificial Sequence
  Synthetic Oligonucleotide
taggcctcgttatagatccagtaga

SEQ ID NO: 2793 - DNA, 25 bp, Artificial Sequence
  Synthetic Oligonucleotide
gttcgcgcgcattaggccgcgagta

SEQ ID NO: 2794 - DNA, 25 bp, Artificial Sequence
  Synthetic Oligonucleotide
cgtagcgcgtgaaaaaggtcgcata

SEQ ID NO: 2795 - DNA, 25 bp, Artificial Sequence
  Synthetic Oligonucleotide
tcgtcggaagaacaggtgtcgaaac

SEQ ID NO: 2796 - DNA, 25 bp, Artificial Sequence
  Synthetic Oligonucleotide
cgtataaaagatgaccggtcgaaac

SEQ ID NO: 2797 - DNA, 25 bp, Artificial Sequence
  Synthetic Oligonucleotide
gacccaagatgagacgaccgtccaa

SEQ ID NO: 2798 - DNA, 25 bp, Artificial Sequence
  Synthetic Oligonucleotide
agaacaagaagtagtgggcgtccaa

SEQ ID NO: 2799 - DNA, 25 bp, Artificial Sequence
  Synthetic Oligonucleotide
gaaaagattggtgacacggtccatg

SEQ ID NO: 2800 - DNA, 25 bp, Artificial Sequence
  Synthetic Oligonucleotide
accagagttcagtcacatgtccatt

SEQ ID NO: 2801 - DNA, 25 bp, Artificial Sequence
  Synthetic Oligonucleotide
acttacgattgggaagatctgcata

SEQ ID NO: 2802 - DNA, 25 bp, Artificial Sequence
  Synthetic Oligonucleotide
catataatagttgtaacagtgccaa

SEQ ID NO: 2803 - DNA, 25 bp, Artificial Sequence
  Synthetic Oligonucleotide
tgaatcgtgagtagcaaatgccgca

SEQ ID NO: 2804 - DNA, 25 bp, Artificial Sequence
  Synthetic Oligonucleotide
gagactgttgtcacaaaactccaga

SEQ ID NO: 2805 - DNA, 25 bp, Artificial Sequence
  Synthetic Oligonucleotide
tcgaactgtttcaccagcaactccc

SEQ ID NO: 2806 - DNA, 25 bp, Artificial Sequence
  Synthetic Oligonucleotide
taaaggacttcagaagtagattccc

SEQ ID NO: 2807 - DNA, 25 bp, Artificial Sequence
  Synthetic Oligonucleotide
aggacttgccatcgtagaactgctg

SEQ ID NO: 2808 - DNA, 25 bp, Artificial Sequence
  Synthetic Oligonucleotide
cagcagttctacgatggcaagtcct

SEQ ID NO: 2809 - DNA, 25 bp, Artificial Sequence
  Synthetic Oligonucleotide
cctcagtataaaagggagatcctta

SEQ ID NO: 2810 - DNA, 25 bp, Artificial Sequence
  Synthetic Oligonucleotide
cccaatataagaggtaatgcccgta

SEQ ID NO: 2811 - DNA, 25 bp, Artificial Sequence
  Synthetic Oligonucleotide
acctcaacttccttcaaagcaccta

SEQ ID NO: 2812 - DNA, 25 bp, Artificial Sequence
  Synthetic Oligonucleotide
accgcatgtccacaaacgcctacag

SEQ ID NO: 2813 - DNA, 25 bp, Artificial Sequence
  Synthetic Oligonucleotide
gtcatatccttcagtaacggacttc

SEQ ID NO: 2814 - DNA, 25 bp, Artificial Sequence
  Synthetic Oligonucleotide
agtcatagtcagctccaccagcgga

SEQ ID NO: 2815 - DNA, 25 bp, Artificial Sequence
  Synthetic Oligonucleotide
tactagcatgaacagcaccaactga

SEQ ID NO: 2816 - DNA, 25 bp, Artificial Sequence
  Synthetic Oligonucleotide
gacccagtagaacagcgccaaccgg

SEQ ID NO: 2817 - DNA, 25 bp, Artificial Sequence
  Synthetic Oligonucleotide
cgccataaatcaacggtacaacagg

SEQ ID NO: 2818 - DNA, 25 bp, Artificial Sequence
  Synthetic Oligonucleotide
gcgggtgaagcaatggtaactactg

SEQ ID NO: 2819 - DNA, 25 bp, Artificial Sequence
  Synthetic Oligonucleotide
gtgggtcaaaagatcgtaaacacta

SEQ ID NO: 2820 - DNA, 25 bp, Artificial Sequence
  Synthetic Oligonucleotide
gtgtggcacacgaaagcattacaga

SEQ ID NO: 2821 - DNA, 25 bp, Artificial Sequence
  Synthetic Oligonucleotide
attgggacgcccaacaccataagga

SEQ ID NO: 2822 - DNA, 25 bp, Artificial Sequence
  Synthetic Oligonucleotide
ttcaggagccggagtaacacttgaa

SEQ ID NO: 2823 - DNA, 25 bp, Artificial Sequence
  Synthetic Oligonucleotide
ggtcggcccgggaaacaacttgcac

SEQ ID NO: 2824 - DNA, 25 bp, Artificial Sequence
  Synthetic Oligonucleotide
ggtcggcccgggaatcacaaattcg

SEQ ID NO: 2825 - DNA, 25 bp, Artificial Sequence
  Synthetic Oligonucleotide
ggtccctctggtattcggaagtatg

SEQ ID NO: 2826 - DNA, 25 bp, Artificial Sequence
  Synthetic Oligonucleotide
gggcccttgcattagtggcatcgta

SEQ ID NO: 2827 - DNA, 25 bp, Artificial Sequence
  Synthetic Oligonucleotide
gggcccttgcattagtggcactgta

SEQ ID NO: 2828 - DNA, 25 bp, Artificial Sequence
  Synthetic Oligonucleotide
gccctgttgtagtgtagccggagta

SEQ ID NO: 2829 - DNA, 25 bp, Artificial Sequence
  Synthetic Oligonucleotide
aactccccagggtggctacggacga

SEQ ID NO: 2830 - DNA, 25 bp, Artificial Sequence
  Synthetic Oligonucleotide
ggtctccccggctggtgccagaaga

SEQ ID NO: 2831 - DNA, 25 bp, Artificial Sequence
  Synthetic Oligonucleotide
tcactgcctggtcgacggctgaaga

SEQ ID NO: 2832 - DNA, 25 bp, Artificial Sequence
  Synthetic Oligonucleotide
tctattgcgtggtctggataggagg

SEQ ID NO: 2833 - DNA, 25 bp, Artificial Sequence
  Synthetic Oligonucleotide
ttaaacgcgcggtcgacggaaggaa

SEQ ID NO: 2834 - DNA, 25 bp, Artificial Sequence
  Synthetic Oligonucleotide
ctaagaccccgtggagaaaaataca

SEQ ID NO: 2835 - DNA, 25 bp, Artificial Sequence
  Synthetic Oligonucleotide
caaaactctaggagtaaacaacctt

SEQ ID NO: 2836 - DNA, 25 bp, Artificial Sequence
  Synthetic Oligonucleotide
gaaaagtgtaagtccgagacagccc

SEQ ID NO: 2837 - DNA, 25 bp, Artificial Sequence
  Synthetic Oligonucleotide
gaagacctacaagatcagccggtcc

SEQ ID NO: 2838 - DNA, 25 bp, Artificial Sequence
  Synthetic Oligonucleotide
gaagacctacaagatcagccgttca

SEQ ID NO: 2839 - DNA, 25 bp, Artificial Sequence
  Synthetic Oligonucleotide
taaaaggcaaaactaagtctttcac

SEQ ID NO: 2840 - DNA, 25 bp, Artificial Sequence
  Synthetic Oligonucleotide
acaggcaccaacctagaacacgaaa

SEQ ID NO: 2841 - DNA, 25 bp, Artificial Sequence
  Synthetic Oligonucleotide
gaccaggcccccatacggaaggaac

SEQ ID NO: 2842 - DNA, 25 bp, Artificial Sequence
  Synthetic Oligonucleotide
tcaagtcgcccaagaggatggacta

SEQ ID NO: 2843 - DNA, 25 bp, Artificial Sequence
  Synthetic Oligonucleotide
tcaagtggccgtagtggcagtcgaa

SEQ ID NO: 2844 - DNA, 25 bp, Artificial Sequence
  Synthetic Oligonucleotide
cgcaagtggcatgtacgagaatgga

SEQ ID NO: 2845 - DNA, 25 bp, Artificial Sequence
  Synthetic Oligonucleotide
tccacaaggggcacgcgaagatgca

SEQ ID NO: 2846 - DNA, 25 bp, Artificial Sequence
  Synthetic Oligonucleotide
taccagaggctcacggaaaggtaca

SEQ ID NO: 2847 - DNA, 25 bp, Artificial Sequence
  Synthetic Oligonucleotide
acgaggcgactcacggcaaggtata

SEQ ID NO: 2848 - DNA, 25 bp, Artificial Sequence
  Synthetic Oligonucleotide
acaagcgatagcgagagagcggtta

SEQ ID NO: 2849 - DNA, 25 bp, Artificial Sequence
  Synthetic Oligonucleotide
gaaaggtctcccgggtaggtgtcag

SEQ ID NO: 2850 - DNA, 25 bp, Artificial Sequence
  Synthetic Oligonucleotide
gaccacggatccggccgggtgctac

SEQ ID NO: 2851 - DNA, 25 bp, Artificial Sequence
  Synthetic Oligonucleotide
ggaccaggagtctcatcgggtccta

SEQ ID NO: 2852 - DNA, 25 bp, Artificial Sequence
  Synthetic Oligonucleotide
cgcccagggcatcaacggctgctac

SEQ ID NO: 2853 - DNA, 25 bp, Artificial Sequence
  Synthetic Oligonucleotide
cgccaccggtagtgcaagagcttca

SEQ ID NO: 2854 - DNA, 25 bp, Artificial Sequence
  Synthetic Oligonucleotide
aattaacacgggtgcaaagctctaa

SEQ ID NO: 2855 - DNA, 25 bp, Artificial Sequence
  Synthetic Oligonucleotide
attacgaaatggacgaaattcttac

SEQ ID NO: 2856 - DNA, 25 bp, Artificial Sequence
  Synthetic Oligonucleotide
tagtaaggtgggatctaactgccta

SEQ ID NO: 2857 - DNA, 25 bp, Artificial Sequence
  Synthetic Oligonucleotide
gctcgtaatttgtatctaatcccga

SEQ ID NO: 2858 - DNA, 25 bp, Artificial Sequence
  Synthetic Oligonucleotide
gattaagtcgttcaaccaaaacttc

SEQ ID NO: 2859 - DNA, 25 bp, Artificial Sequence
  Synthetic Oligonucleotide
tttaggtttaaatcactaagatata

SEQ ID NO: 2860 - DNA, 25 bp, Artificial Sequence
  Synthetic Oligonucleotide
cttctttaaatagcgtaacgcgtta

SEQ ID NO: 2861 - DNA, 25 bp, Artificial Sequence
  Synthetic Oligonucleotide
cttagttagtgtatcggcagttgta

SEQ ID NO: 2862 - DNA, 25 bp, Artificial Sequence
  Synthetic Oligonucleotide
tcggtttaagggatgctcggctaga

SEQ ID NO: 2863 - DNA, 25 bp, Artificial Sequence
  Synthetic Oligonucleotide
atgctggacaggcccccggcgtagc

SEQ ID NO: 2864 - DNA, 25 bp, Artificial Sequence
  Synthetic Oligonucleotide
acatggccatgtcctacgccggggc

SEQ ID NO: 2865 - DNA, 25 bp, Artificial Sequence
  Synthetic Oligonucleotide
ccattggcattcgtcggtcggcgga

SEQ ID NO: 2866 - DNA, 25 bp, Artificial Sequence
  Synthetic Oligonucleotide
atcaggcggttcgacgccggtagga

SEQ ID NO: 2867 - DNA, 25 bp, Artificial Sequence
  Synthetic Oligonucleotide
gatgaccggtcgtaactcagtagga

SEQ ID NO: 2868 - DNA, 25 bp, Artificial Sequence
  Synthetic Oligonucleotide
gggttatgccggattaggcaactga

SEQ ID NO: 2869 - DNA, 25 bp, Artificial Sequence
  Synthetic Oligonucleotide
gtagttttgcgcactaggtgaatgc

SEQ ID NO: 2870 - DNA, 25 bp, Artificial Sequence
  Synthetic Oligonucleotide
cattgttgaccagagatgatatgtc

SEQ ID NO: 2871 - DNA, 25 bp, Artificial Sequence
  Synthetic Oligonucleotide
aagcgatagccacagagcggttata

SEQ ID NO: 2872 - DNA, 25 bp, Artificial Sequence
  Synthetic Oligonucleotide
agaagttccccacatgtaccgttga

SEQ ID NO: 2873 - DNA, 25 bp, Artificial Sequence
  Synthetic Oligonucleotide
atcaggtcccgcaacatcctttcga

SEQ ID NO: 2874 - DNA, 25 bp, Artificial Sequence
  Synthetic Oligonucleotide
cgccgagcccggtcgaaacttgtga

SEQ ID NO: 2875 - DNA, 25 bp, Artificial Sequence
  Synthetic Oligonucleotide
cgccgagcccggtcgaaacttgtga

SEQ ID NO: 2876 - DNA, 25 bp, Artificial Sequence
  Synthetic Oligonucleotide
cctaggcaacaggtggtgatttcga

SEQ ID NO: 2877 - DNA, 25 bp, Artificial Sequence
  Synthetic Oligonucleotide
ctactgggaaagatgctgtcccagc

SEQ ID NO: 2878 - DNA, 25 bp, Artificial Sequence
  Synthetic Oligonucleotide
ctcgggaacatctcctcgccgaagg

SEQ ID NO: 2879 - DNA, 25 bp, Artificial Sequence
  Synthetic Oligonucleotide
tctggggacatctttctcctgaaga

SEQ ID NO: 2880 - DNA, 25 bp, Artificial Sequence
  Synthetic Oligonucleotide
tactgtgaagattcctcaaatgaaa

SEQ ID NO: 2881 - DNA, 25 bp, Artificial Sequence
  Synthetic Oligonucleotide
cttgaagggtctacagaactcaaga

SEQ ID NO: 2882 - DNA, 25 bp, Artificial Sequence
  Synthetic Oligonucleotide
ttggactggtcgtacgggtccatga

SEQ ID NO: 2883 - DNA, 25 bp, Artificial Sequence
  Synthetic Oligonucleotide
ggtccctgctcgtacttcgccggca

SEQ ID NO: 2884 - DNA, 25 bp, Artificial Sequence
  Synthetic Oligonucleotide
gtccctgctcgatcttcgccggcac

SEQ ID NO: 2885 - DNA, 25 bp, Artificial Sequence
  Synthetic Oligonucleotide
cgtccctgcatttgttgcgttcgac

SEQ ID NO: 2886 - DNA, 25 bp, Artificial Sequence
  Synthetic Oligonucleotide
ctcacctgacatgagtattctggga

SEQ ID NO: 2887 - DNA, 25 bp, Artificial Sequence
  Synthetic Oligonucleotide
ctctagtctgctgtagcccgcgcaa

SEQ ID NO: 2888 - DNA, 25 bp, Artificial Sequence
  Synthetic Oligonucleotide
acgtctacttctagaccctcggcaa

SEQ ID NO: 2889 - DNA, 25 bp, Artificial Sequence
  Synthetic Oligonucleotide
tttactcttcggagctcccggggac

SEQ ID NO: 2890 - DNA, 25 bp, Artificial Sequence
  Synthetic Oligonucleotide
tcttccaccgtgcttccgcgaggga

SEQ ID NO: 2891 - DNA, 25 bp, Artificial Sequence
  Synthetic Oligonucleotide
ggtgccctaaagcagtcccaaggac

SEQ ID NO: 2892 - DNA, 25 bp, Artificial Sequence
  Synthetic Oligonucleotide
gttccgacaagactattcccaacct

SEQ ID NO: 2893 - DNA, 25 bp, Artificial Sequence
  Synthetic Oligonucleotide
cggttgaccaaacacttgtcgcaaa

SEQ ID NO: 2894 - DNA, 25 bp, Artificial Sequence
  Synthetic Oligonucleotide
gtctaattatatacactttcggaaa

SEQ ID NO: 2895 - DNA, 25 bp, Artificial Sequence
  Synthetic Oligonucleotide
gacacttaaatcctcgtttgggcta

SEQ ID NO: 2896 - DNA, 25 bp, Artificial Sequence
  Synthetic Oligonucleotide
gacctaaaagaccttcggtccccta

SEQ ID NO: 2897 - DNA, 25 bp, Artificial Sequence
  Synthetic Oligonucleotide
ggctaggaaggcatcggcaactaag

SEQ ID NO: 2898 - DNA, 25 bp, Artificial Sequence
  Synthetic Oligonucleotide
tgctggaccggcatctgctgcacga

SEQ ID NO: 2899 - DNA, 25 bp, Artificial Sequence
  Synthetic Oligonucleotide
ccttggcgagcatcggttatcacta

SEQ ID NO: 2900 - DNA, 25 bp, Artificial Sequence
  Synthetic Oligonucleotide
gtctttagcttcacgcgtaagccta

SEQ ID NO: 2901 - DNA, 25 bp, Artificial Sequence
  Synthetic Oligonucleotide
ttcttcttatgtggtaaacgtacta

SEQ ID NO: 2902 - DNA, 25 bp, Artificial Sequence
  Synthetic Oligonucleotide
ttctttctcgagtgtcagacagtta

SEQ ID NO: 2903 - DNA, 25 bp, Artificial Sequence
  Synthetic Oligonucleotide
tgtctcttgtcgaacagccgaagca

SEQ ID NO: 2904 - DNA, 25 bp, Artificial Sequence
  Synthetic Oligonucleotide
ttgtccaggtactcgggcgacagca

SEQ ID NO: 2905 - DNA, 25 bp, Artificial Sequence
  Synthetic Oligonucleotide
atggccagttacgcggcgcgcttta

SEQ ID NO: 2906 - DNA, 25 bp, Artificial Sequence
  Synthetic Oligonucleotide
gggccaggagccggtcctacgctta

SEQ ID NO: 2907 - DNA, 25 bp, Artificial Sequence
  Synthetic Oligonucleotide
tccgatcggtaatcggtcccggtta

SEQ ID NO: 2908 - DNA, 25 bp, Artificial Sequence
  Synthetic Oligonucleotide
ctttacgcgtacaagctgccgtgga

SEQ ID NO: 2909 - DNA, 25 bp, Artificial Sequence
  Synthetic Oligonucleotide
ttccgtgaccgacaagtgccgggta

SEQ ID NO: 2910 - DNA, 25 bp, Artificial Sequence
  Synthetic Oligonucleotide
tccgtcaccgagaaagttgatgaga

SEQ ID NO: 2911 - DNA, 25 bp, Artificial Sequence
  Synthetic Oligonucleotide
gtactccattagacattctagtgca

SEQ ID NO: 2912 - DNA, 25 bp, Artificial Sequence
  Synthetic Oligonucleotide
cttgcgatctcgcacaaaacgtgca

SEQ ID NO: 2913 - DNA, 25 bp, Artificial Sequence
  Synthetic Oligonucleotide
tacaaccggtcccaccagaacttga

SEQ ID NO: 2914 - DNA, 25 bp, Artificial Sequence
  Synthetic Oligonucleotide
tatatcagaacccacagggtcttga

SEQ ID NO: 2915 - DNA, 25 bp, Artificial Sequence
  Synthetic Oligonucleotide
tttcaccagcaagtcccgttacggt

SEQ ID NO: 2916 - DNA, 25 bp, Artificial Sequence
  Synthetic Oligonucleotide
tgtcccacaagatgaccccgttgag

SEQ ID NO: 2917 - DNA, 25 bp, Artificial Sequence
  Synthetic Oligonucleotide
tcgtaccccttgagagacccgggac

SEQ ID NO: 2918 - DNA, 25 bp, Artificial Sequence
  Synthetic Oligonucleotide
taggcctcgttaaagatccagtaga

SEQ ID NO: 2919 - DNA, 25 bp, Artificial Sequence
  Synthetic Oligonucleotide
gttcgcgcgcataaggccgcgagta

SEQ ID NO: 2920 - DNA, 25 bp, Artificial Sequence
  Synthetic Oligonucleotide
cgtagcgcgtgataaaggtcgcata

SEQ ID NO: 2921 - DNA, 25 bp, Artificial Sequence
  Synthetic Oligonucleotide
tcgtcggaagaagaggtgtcgaaac

SEQ ID NO: 2922 - DNA, 25 bp, Artificial Sequence
  Synthetic Oligonucleotide
cgtataaaagatcaccggtcgaaac

SEQ ID NO: 2923 - DNA, 25 bp, Artificial Sequence
  Synthetic Oligonucleotide
gacccaagatgacacgaccgtccaa

SEQ ID NO: 2924 - DNA, 25 bp, Artificial Sequence
  Synthetic Oligonucleotide
agaacaagaagttgtgggcgtccaa

SEQ ID NO: 2925 - DNA, 25 bp, Artificial Sequence
  Synthetic Oligonucleotide
gaaaagattggtcacacggtccatg

SEQ ID NO: 2926 - DNA, 25 bp, Artificial Sequence
  Synthetic Oligonucleotide
accagagttcagacacatgtccatt

SEQ ID NO: 2927 - DNA, 25 bp, Artificial Sequence
  Synthetic Oligonucleotide
acttacgattggcaagatctgcata

SEQ ID NO: 2928 - DNA, 25 bp, Artificial Sequence
  Synthetic Oligonucleotide
catataatagttctaacagtgccaa

SEQ ID NO: 2929 - DNA, 25 bp, Artificial Sequence
  Synthetic Oligonucleotide
tgaatcgtgagttgcaaatgccgca

SEQ ID NO: 2930 - DNA, 25 bp, Artificial Sequence
  Synthetic Oligonucleotide
gagactgttgtctcaaaactccaga

SEQ ID NO: 2931 - DNA, 25 bp, Artificial Sequence
  Synthetic Oligonucleotide
tcgaactgtttctccagcaactccc

SEQ ID NO: 2932 - DNA, 25 bp, Artificial Sequence
  Synthetic Oligonucleotide
taaaggacttcacaagtagattccc

SEQ ID NO: 2933 - DNA, 25 bp, Artificial Sequence
  Synthetic Oligonucleotide
cagcagttctacgatggcaagtcct

SEQ ID NO: 2934 - DNA, 25 bp, Artificial Sequence
  Synthetic Oligonucleotide
aggacttgccatcgtagaactgctg

SEQ ID NO: 2935 - DNA, 25 bp, Artificial Sequence
  Synthetic Oligonucleotide
cacgttagtttcaggagccggtgta

SEQ ID NO: 2936 - DNA, 25 bp, Artificial Sequence
  Synthetic Oligonucleotide
gccacgtatgaagaggaacagccta

SEQ ID NO: 2937 - DNA, 25 bp, Artificial Sequence
  Synthetic Oligonucleotide
atgttatcaatcctgaaagctcgta

SEQ ID NO: 2938 - DNA, 25 bp, Artificial Sequence
  Synthetic Oligonucleotide
aatctaatcccgaaaacacgagtca

SEQ ID NO: 2939 - DNA, 25 bp, Artificial Sequence
  Synthetic Oligonucleotide
tcacatcgcgcgcacgccgggtctt

SEQ ID NO: 2940 - DNA, 25 bp, Artificial Sequence
  Synthetic Oligonucleotide
taacacagccaaacccgtcgtcgtt

SEQ ID NO: 2941 - DNA, 25 bp, Artificial Sequence
  Synthetic Oligonucleotide
atcaagagcgccaagctcccgtcta

SEQ ID NO: 2942 - DNA, 25 bp, Artificial Sequence
  Synthetic Oligonucleotide
ggccggagccacaagccgccgtaga

SEQ ID NO: 2943 - DNA, 25 bp, Artificial Sequence
  Synthetic Oligonucleotide
tggggtaaactacaaccgccctaga

SEQ ID NO: 2944 - DNA, 25 bp, Artificial Sequence
  Synthetic Oligonucleotide
gaggtagaagagctgctgccacata

SEQ ID NO: 2945 - DNA, 25 bp, Artificial Sequence
  Synthetic Oligonucleotide
cacgcggtctagcggcggcgaaacc

SEQ ID NO: 2946 - DNA, 25 bp, Artificial Sequence
  Synthetic Oligonucleotide
gccggagcagcatgaggacgaacca

SEQ ID NO: 2947 - DNA, 25 bp, Artificial Sequence
  Synthetic Oligonucleotide
gaagggcaactactgttcgaagggt

SEQ ID NO: 2948 - DNA, 25 bp, Artificial Sequence
  Synthetic Oligonucleotide
aaggtgtccctacctttcctagtgg

SEQ ID NO: 2949 - DNA, 25 bp, Artificial Sequence
  Synthetic Oligonucleotide
cgacggccgtctcctttctcttgta

SEQ ID NO: 2950 - DNA, 25 bp, Artificial Sequence
  Synthetic Oligonucleotide
aggacgaccgggtcgtcccgcttga

SEQ ID NO: 2951 - DNA, 25 bp, Artificial Sequence
  Synthetic Oligonucleotide
ctggtccgcgggttatgccggttta

SEQ ID NO: 2952 - DNA, 25 bp, Artificial Sequence
  Synthetic Oligonucleotide
tgggcacgaggctcgtctgcgttta

SEQ ID NO: 2953 - DNA, 25 bp, Artificial Sequence
  Synthetic Oligonucleotide
aaggtgctaggctcatctccttgta

SEQ ID NO: 2954 - DNA, 25 bp, Artificial Sequence
  Synthetic Oligonucleotide
cgtagctggccattacgtccgttta

SEQ ID NO: 2955 - DNA, 25 bp, Artificial Sequence
  Synthetic Oligonucleotide
gtccggtcaacgttagcgacgttga

SEQ ID NO: 2956 - DNA, 25 bp, Artificial Sequence
  Synthetic Oligonucleotide
tgcgcacgggtacataccacactga

SEQ ID NO: 2957 - DNA, 25 bp, Artificial Sequence
  Synthetic Oligonucleotide
taacgactcgtgagcccgccatgta

SEQ ID NO: 2958 - DNA, 25 bp, Artificial Sequence
  Synthetic Oligonucleotide
aggttacctaggagcgccttcctaa

SEQ ID NO: 2959 - DNA, 25 bp, Artificial Sequence
  Synthetic Oligonucleotide
gttactctgtggtccctaatctata

SEQ ID NO: 2960 - DNA, 25 bp, Artificial Sequence
  Synthetic Oligonucleotide
agtattacgacggcgcaacattata

SEQ ID NO: 2961 - DNA, 25 bp, Artificial Sequence
  Synthetic Oligonucleotide
aaaattgacgtcgttgaaattatat

SEQ ID NO: 2962 - DNA, 25 bp, Artificial Sequence
  Synthetic Oligonucleotide
aaagatgaccggtcgaaactcagta

SEQ ID NO: 2963 - DNA, 25 bp, Artificial Sequence
  Synthetic Oligonucleotide
atcagtaaactgggagtgactcata

SEQ ID NO: 2964 - DNA, 25 bp, Artificial Sequence
  Synthetic Oligonucleotide
ttactagaactggaagtaccttcta

SEQ ID NO: 2965 - DNA, 25 bp, Artificial Sequence
  Synthetic Oligonucleotide
ttatcagtacaagcaagacattata

SEQ ID NO: 2966 - DNA, 25 bp, Artificial Sequence
  Synthetic Oligonucleotide
tgtacgagtacagaaaccggtaata

SEQ ID NO: 2967 - DNA, 25 bp, Artificial Sequence
  Synthetic Oligonucleotide
caaaggcggctataatatcggatta

SEQ ID NO: 2968 - DNA, 25 bp, Artificial Sequence
  Synthetic Oligonucleotide
ctgatggtcccatagattaggacaa

SEQ ID NO: 2969 - DNA, 25 bp, Artificial Sequence
  Synthetic Oligonucleotide
ctgatggtcccatagattaggacaa

SEQ ID NO: 2970 - DNA, 25 bp, Artificial Sequence
  Synthetic Oligonucleotide
ctgatggtcccatagattaggacaa

SEQ ID NO: 2971 - DNA, 25 bp, Artificial Sequence
  Synthetic Oligonucleotide
cttgggtcggaactggtatggtcaa

SEQ ID NO: 2972 - DNA, 25 bp, Artificial Sequence
  Synthetic Oligonucleotide
gtggtgggacaacgacatcggcata

SEQ ID NO: 2973 - DNA, 25 bp, Artificial Sequence
  Synthetic Oligonucleotide
tgtgtgggcgaaaggacgcctctta

SEQ ID NO: 2974 - DNA, 25 bp, Artificial Sequence
  Synthetic Oligonucleotide
ggaggttgacgaaaggccgcttcta

SEQ ID NO: 2975 - DNA, 25 bp, Artificial Sequence
  Synthetic Oligonucleotide
gtcagtttagagatggccggtttag

SEQ ID NO: 2976 - DNA, 25 bp, Artificial Sequence
  Synthetic Oligonucleotide
ccgttatgtagaagtgcctgttcta

SEQ ID NO: 2977 - DNA, 25 bp, Artificial Sequence
  Synthetic Oligonucleotide
ccgaaggacgagctgcgagacttta

SEQ ID NO: 2978 - DNA, 25 bp, Artificial Sequence
  Synthetic Oligonucleotide
gcaaacgcccgtcataaacgttaga

SEQ ID NO: 2979 - DNA, 25 bp, Artificial Sequence
  Synthetic Oligonucleotide
gaaaaggaggcgaataactatacga

SEQ ID NO: 2980 - DNA, 25 bp, Artificial Sequence
  Synthetic Oligonucleotide
ttagagatggccggtttagctaaga

SEQ ID NO: 2981 - DNA, 25 bp, Artificial Sequence
  Synthetic Oligonucleotide
gatactacgtcgtcacttttttaga

SEQ ID NO: 2982 - DNA, 25 bp, Artificial Sequence
  Synthetic Oligonucleotide
cgagtatcctcctctttcatggtac

SEQ ID NO: 2983 - DNA, 25 bp, Artificial Sequence
  Synthetic Oligonucleotide
ccgagtatcctcctctttcatggta

SEQ ID NO: 2984 - DNA, 25 bp, Artificial Sequence
  Synthetic Oligonucleotide
ttcaactatcccgtctttaaactta

SEQ ID NO: 2985 - DNA, 25 bp, Artificial Sequence
  Synthetic Oligonucleotide
ccacttacttccgatctcaaaccta

SEQ ID NO: 2986 - DNA, 25 bp, Artificial Sequence
  Synthetic Oligonucleotide
cgccgattcacagttctcggctctt

SEQ ID NO: 2987 - DNA, 25 bp, Artificial Sequence
  Synthetic Oligonucleotide
agacaattctagactttccgttctg

SEQ ID NO: 2988 - DNA, 25 bp, Artificial Sequence
  Synthetic Oligonucleotide
gacacatgaggtcctcttccgccta

SEQ ID NO: 2989 - DNA, 25 bp, Artificial Sequence
  Synthetic Oligonucleotide
gacaccagtgcttcctcatcggtgc

SEQ ID NO: 2990 - DNA, 25 bp, Artificial Sequence
  Synthetic Oligonucleotide
tccaggagttcttcccatcggtcac

SEQ ID NO: 2991 - DNA, 25 bp, Artificial Sequence
  Synthetic Oligonucleotide
gtcacggaaacttgtgacttgatga

SEQ ID NO: 2992 - DNA, 25 bp, Artificial Sequence
  Synthetic Oligonucleotide
tgtctcgggtgataggctctgtgga

SEQ ID NO: 2993 - DNA, 25 bp, Artificial Sequence
  Synthetic Oligonucleotide
aaccggtccgaccagaacttgagga

SEQ ID NO: 2994 - DNA, 25 bp, Artificial Sequence
  Synthetic Oligonucleotide
tccgagtcagagctaagcttaagca

SEQ ID NO: 2995 - DNA, 25 bp, Artificial Sequence
  Synthetic Oligonucleotide
tttagtttccgtagctgtagtagca

SEQ ID NO: 2996 - DNA, 25 bp, Artificial Sequence
  Synthetic Oligonucleotide
ctttggtaccatccggtgataggat

SEQ ID NO: 2997 - DNA, 25 bp, Artificial Sequence
  Synthetic Oligonucleotide
actataggagtatcctccgggggaa

SEQ ID NO: 2998 - DNA, 25 bp, Artificial Sequence
  Synthetic Oligonucleotide
aacattcttatggttcggggacgaa

SEQ ID NO: 2999 - DNA, 25 bp, Artificial Sequence
  Synthetic Oligonucleotide
agttgcgttcgaatactgggcgtga

SEQ ID NO: 3000 - DNA, 25 bp, Artificial Sequence
  Synthetic Oligonucleotide
aatggcgccgacgaccgtggtctga

SEQ ID NO: 3001 - DNA, 25 bp, Artificial Sequence
  Synthetic Oligonucleotide
gagagacccgaggatgatgttgtat

SEQ ID NO: 3002 - DNA, 25 bp, Artificial Sequence
  Synthetic Oligonucleotide
caagaacagcgtaaaggttttcgta

SEQ ID NO: 3003 - DNA, 25 bp, Artificial Sequence
  Synthetic Oligonucleotide
ccaagtgtctaggtgtggatttggc

SEQ ID NO: 3004 - DNA, 25 bp, Artificial Sequence
  Synthetic Oligonucleotide
taagcggtcgttcgtgggttccgga

SEQ ID NO: 3005 - DNA, 25 bp, Artificial Sequence
  Synthetic Oligonucleotide
taagggacactttgggactcacgga

SEQ ID NO: 3006 - DNA, 25 bp, Artificial Sequence
  Synthetic Oligonucleotide
gaagagattcgtctaggactccgga

SEQ ID NO: 3007 - DNA, 25 bp, Artificial Sequence
  Synthetic Oligonucleotide
ggaggtgtatccggaagaactggag

SEQ ID NO: 3008 - DNA, 25 bp, Artificial Sequence
  Synthetic Oligonucleotide
tgtgagacttcctggggacctctga

SEQ ID NO: 3009 - DNA, 25 bp, Artificial Sequence
  Synthetic Oligonucleotide
tttcgaccgttgtggggccgacaac

SEQ ID NO: 3010 - DNA, 25 bp, Artificial Sequence
  Synthetic Oligonucleotide
cttgaccgttcggtgcttggtgccc

SEQ ID NO: 3011 - DNA, 25 bp, Artificial Sequence
  Synthetic Oligonucleotide
ctccaggtgtcgagcgttggccacc

SEQ ID NO: 3012 - DNA, 25 bp, Artificial Sequence
  Synthetic Oligonucleotide
tctcgacaggacataggtttccccc

SEQ ID NO: 3013 - DNA, 25 bp, Artificial Sequence
  Synthetic Oligonucleotide
tctacggcggcttgtggctccggcc

SEQ ID NO: 3014 - DNA, 25 bp, Artificial Sequence
  Synthetic Oligonucleotide
gccacgccggctcgaggcttgtgaa

SEQ ID NO: 3015 - DNA, 25 bp, Artificial Sequence
  Synthetic Oligonucleotide
tgcatcttcgcgagccccttgtgga

SEQ ID NO: 3016 - DNA, 25 bp, Artificial Sequence
  Synthetic Oligonucleotide
gtcttccccgtctctactactggga

SEQ ID NO: 3017 - DNA, 25 bp, Artificial Sequence
  Synthetic Oligonucleotide
cctcacttcccttacagtgaggact

SEQ ID NO: 3018 - DNA, 25 bp, Artificial Sequence
  Synthetic Oligonucleotide
ccgcaattcttgttcgagcacgctt

SEQ ID NO: 3019 - DNA, 25 bp, Artificial Sequence
  Synthetic Oligonucleotide
gcgggacattctacggtcgggaccc

SEQ ID NO: 3020 - DNA, 25 bp, Artificial Sequence
  Synthetic Oligonucleotide
gcattcgtatacatcgtaggtacaa

SEQ ID NO: 3021 - DNA, 25 bp, Artificial Sequence
  Synthetic Oligonucleotide
cacaaacattcacatgatgtactca

SEQ ID NO: 3022 - DNA, 25 bp, Artificial Sequence
  Synthetic Oligonucleotide
cgcactccatctctctttggtcgca

SEQ ID NO: 3023 - DNA, 25 bp, Artificial Sequence
  Synthetic Oligonucleotide
agagctaccaccacttctgaggcca

SEQ ID NO: 3024 - DNA, 25 bp, Artificial Sequence
  Synthetic Oligonucleotide
gcatctccctgtcgtgacggaccta

SEQ ID NO: 3025 - DNA, 25 bp, Artificial Sequence
  Synthetic Oligonucleotide
ttatgcactgtagcagagataacta

SEQ ID NO: 3026 - DNA, 25 bp, Artificial Sequence
  Synthetic Oligonucleotide
atttatgcctgtactcgcgatacca

SEQ ID NO: 3027 - DNA, 25 bp, Artificial Sequence
  Synthetic Oligonucleotide
ttctaactgcctagtcagaatcgga

SEQ ID NO: 3028 - DNA, 25 bp, Artificial Sequence
  Synthetic Oligonucleotide
cgaactgcgcgtactctaattggta

SEQ ID NO: 3029 - DNA, 25 bp, Artificial Sequence
  Synthetic Oligonucleotide
ccacctgaggacacgtgagggtgta

SEQ ID NO: 3030 - DNA, 25 bp, Artificial Sequence
  Synthetic Oligonucleotide
cctatcagagccactgaaattacgt

SEQ ID NO: 3031 - DNA, 25 bp, Artificial Sequence
  Synthetic Oligonucleotide
ccttcaagatccaggaaacgattac

SEQ ID NO: 3032 - DNA, 25 bp, Artificial Sequence
  Synthetic Oligonucleotide
acatagtagacgaggacatagatta

SEQ ID NO: 3033 - DNA, 25 bp, Artificial Sequence
  Synthetic Oligonucleotide
gtcgacttacacaaggctaacatta

SEQ ID NO: 3034 - DNA, 25 bp, Artificial Sequence
  Synthetic Oligonucleotide
ttcacctaccacagcttcgacagga

SEQ ID NO: 3035 - DNA, 25 bp, Artificial Sequence
  Synthetic Oligonucleotide
aaatcgtcaaccaaattatcgggga

SEQ ID NO: 3036 - DNA, 25 bp, Artificial Sequence
  Synthetic Oligonucleotide
tactgtgccaacgacattggggtga

SEQ ID NO: 3037 - DNA, 25 bp, Artificial Sequence
  Synthetic Oligonucleotide
ttgaaccaaaacttctcgaagttga

SEQ ID NO: 3038 - DNA, 25 bp, Artificial Sequence
  Synthetic Oligonucleotide
gagttctgaagacccttcaagttaa

SEQ ID NO: 3039 - DNA, 25 bp, Artificial Sequence
  Synthetic Oligonucleotide
ggtacaccaacgaccctaaacttga

SEQ ID NO: 3040 - DNA, 25 bp, Artificial Sequence
  Synthetic Oligonucleotide
ttatatcacaagacccaatcgttgg

SEQ ID NO: 3041 - DNA, 25 bp, Artificial Sequence
  Synthetic Oligonucleotide
ggttttcagagtatccgaaacttgg

SEQ ID NO: 3042 - DNA, 25 bp, Artificial Sequence
  Synthetic Oligonucleotide
gttgttggatattgtcaacccgtga

SEQ ID NO: 3043 - DNA, 25 bp, Artificial Sequence
  Synthetic Oligonucleotide
tactgtcgtcgttttgcgaacccca

SEQ ID NO: 3044 - DNA, 25 bp, Artificial Sequence
  Synthetic Oligonucleotide
tcctacagcttcttgtggaacccca

SEQ ID NO: 3045 - DNA, 25 bp, Artificial Sequence
  Synthetic Oligonucleotide
tagaagagcgccaaccggaacccca

SEQ ID NO: 3046 - DNA, 25 bp, Artificial Sequence
  Synthetic Oligonucleotide
tagctggtgcctttgcaaccctcac

SEQ ID NO: 3047 - DNA, 25 bp, Artificial Sequence
  Synthetic Oligonucleotide
agacagttaggacaggcacaggccc

SEQ ID NO: 3048 - DNA, 25 bp, Artificial Sequence
  Synthetic Oligonucleotide
attaggtaagtacgcgcagtgatta

SEQ ID NO: 3049 - DNA, 25 bp, Artificial Sequence
  Synthetic Oligonucleotide
cagtgtgaagtactaccttaactta

SEQ ID NO: 3050 - DNA, 25 bp, Artificial Sequence
  Synthetic Oligonucleotide
agtggagactgttaacttatgacta

SEQ ID NO: 3051 - DNA, 25 bp, Artificial Sequence
  Synthetic Oligonucleotide
ggaactactgtacacacctgtacta

SEQ ID NO: 3052 - DNA, 25 bp, Artificial Sequence
  Synthetic Oligonucleotide
aggagtcaagtatcatatacttata

SEQ ID NO: 3053 - DNA, 25 bp, Artificial Sequence
  Synthetic Oligonucleotide
agtgttacaacagtaactctcgtta

SEQ ID NO: 3054 - DNA, 25 bp, Artificial Sequence
  Synthetic Oligonucleotide
tacagtccgaagaacaagttactta

SEQ ID NO: 3055 - DNA, 25 bp, Artificial Sequence
  Synthetic Oligonucleotide
tcgtagtggggtaaactagaactgc

SEQ ID NO: 3056 - DNA, 25 bp, Artificial Sequence
  Synthetic Oligonucleotide
gtcatgtcggagtagatagaaccta

SEQ ID NO: 3057 - DNA, 25 bp, Artificial Sequence
  Synthetic Oligonucleotide
taccggtggttctcgaaaagaacca

SEQ ID NO: 3058 - DNA, 25 bp, Artificial Sequence
  Synthetic Oligonucleotide
acatagattatctcgaaggaaatca

SEQ ID NO: 3059 - DNA, 25 bp, Artificial Sequence
  Synthetic Oligonucleotide
aggacttgccatcgtagaactgctg

SEQ ID NO: 3060 - DNA, 25 bp, Artificial Sequence
  Synthetic Oligonucleotide
cagcagttctacgatggcaagtcct

SEQ ID NO: 3061 - DNA, 25 bp, Artificial Sequence
  Synthetic Oligonucleotide
cacgttagtttctggagccggtgta

SEQ ID NO: 3062 - DNA, 25 bp, Artificial Sequence
  Synthetic Oligonucleotide
gccacgtatgaacaggaacagccta

SEQ ID NO: 3063 - DNA, 25 bp, Artificial Sequence
  Synthetic Oligonucleotide
atgttatcaatcgtgaaagctcgta

SEQ ID NO: 3064 - DNA, 25 bp, Artificial Sequence
  Synthetic Oligonucleotide
aatctaatcccgtaaacacgagtca

SEQ ID NO: 3065 - DNA, 25 bp, Artificial Sequence
  Synthetic Oligonucleotide
tcacatcgcgcggacgccgggtctt

SEQ ID NO: 3066 - DNA, 25 bp, Artificial Sequence
  Synthetic Oligonucleotide
taacacagccaatcccgtcgtcgtt

SEQ ID NO: 3067 - DNA, 25 bp, Artificial Sequence
  Synthetic Oligonucleotide
atcaagagcgcctagctcccgtcta

SEQ ID NO: 3068 - DNA, 25 bp, Artificial Sequence
  Synthetic Oligonucleotide
ggccggagccactagccgccgtaga

SEQ ID NO: 3069 - DNA, 25 bp, Artificial Sequence
  Synthetic Oligonucleotide
tggggtaaactagaaccgccctaga

SEQ ID NO: 3070 - DNA, 25 bp, Artificial Sequence
  Synthetic Oligonucleotide
gaggtagaagaggtgctgccacata

SEQ ID NO: 3071 - DNA, 25 bp, Artificial Sequence
  Synthetic Oligonucleotide
cacgcggtctaggggcggcgaaacc

SEQ ID NO: 3072 - DNA, 25 bp, Artificial Sequence
  Synthetic Oligonucleotide
gccggagcagcaagaggacgaacca

SEQ ID NO: 3073 - DNA, 25 bp, Artificial Sequence
  Synthetic Oligonucleotide
gaagggcaactagtgttcgaagggt

SEQ ID NO: 3074 - DNA, 25 bp, Artificial Sequence
  Synthetic Oligonucleotide
aaggtgtccctagctttcctagtgg

SEQ ID NO: 3075 - DNA, 25 bp, Artificial Sequence
  Synthetic Oligonucleotide
cgacggccgtctgctttctcttgta

SEQ ID NO: 3076 - DNA, 25 bp, Artificial Sequence
  Synthetic Oligonucleotide
aggacgaccgggacgtcccgcttga

SEQ ID NO: 3077 - DNA, 25 bp, Artificial Sequence
  Synthetic Oligonucleotide
ctggtccgcgggatatgccggttta

SEQ ID NO: 3078 - DNA, 25 bp, Artificial Sequence
  Synthetic Oligonucleotide
tgggcacgaggcacgtctgcgttta

SEQ ID NO: 3079 - DNA, 25 bp, Artificial Sequence
  Synthetic Oligonucleotide
aaggtgctaggcacatctccttgta

SEQ ID NO: 3080 - DNA, 25 bp, Artificial Sequence
  Synthetic Oligonucleotide
cgtagctggccaatacgtccgttta

SEQ ID NO: 3081 - DNA, 25 bp, Artificial Sequence
  Synthetic Oligonucleotide
gtccggtcaacgatagcgacgttga

SEQ ID NO: 3082 - DNA, 25 bp, Artificial Sequence
  Synthetic Oligonucleotide
tgcgcacgggtagataccacactga

SEQ ID NO: 3083 - DNA, 25 bp, Artificial Sequence
  Synthetic Oligonucleotide
taacgactcgtgtgcccgccatgta

SEQ ID NO: 3084 - DNA, 25 bp, Artificial Sequence
  Synthetic Oligonucleotide
aggttacctaggtgcgccttcctaa

SEQ ID NO: 3085 - DNA, 25 bp, Artificial Sequence
  Synthetic Oligonucleotide
gttactctgtggaccctaatctata

SEQ ID NO: 3086 - DNA, 25 bp, Artificial Sequence
  Synthetic Oligonucleotide
agtattacgacgccgcaacattata

SEQ ID NO: 3087 - DNA, 25 bp, Artificial Sequence
  Synthetic Oligonucleotide
aaaattgacgtccttgaaattatat

SEQ ID NO: 3088 - DNA, 25 bp, Artificial Sequence
  Synthetic Oligonucleotide
aaagatgaccggacgaaactcagta

SEQ ID NO: 3089 - DNA, 25 bp, Artificial Sequence
  Synthetic Oligonucleotide
atcagtaaactgcgagtgactcata

SEQ ID NO: 3090 - DNA, 25 bp, Artificial Sequence
  Synthetic Oligonucleotide
ttactagaactgcaagtaccttcta

SEQ ID NO: 3091 - DNA, 25 bp, Artificial Sequence
  Synthetic Oligonucleotide
ttatcagtacaaccaagacattata

SEQ ID NO: 3092 - DNA, 25 bp, Artificial Sequence
  Synthetic Oligonucleotide
tgtacgagtacacaaaccggtaata

SEQ ID NO: 3093 - DNA, 25 bp, Artificial Sequence
  Synthetic Oligonucleotide
caaaggcggctaaaatatcggatta

SEQ ID NO: 3094 - DNA, 25 bp, Artificial Sequence
  Synthetic Oligonucleotide
ctgatggtcccaaagattaggacaa

SEQ ID NO: 3095 - DNA, 25 bp, Artificial Sequence
  Synthetic Oligonucleotide
ctgatggtcccaaagattaggacaa

SEQ ID NO: 3096 - DNA, 25 bp, Artificial Sequence
  Synthetic Oligonucleotide
ctgatggtcccaaagattaggacaa

SEQ ID NO: 3097 - DNA, 25 bp, Artificial Sequence
  Synthetic Oligonucleotide
cttgggtcggaagtggtatggtcaa

SEQ ID NO: 3098 - DNA, 25 bp, Artificial Sequence
  Synthetic Oligonucleotide
gtggtgggacaaggacatcggcata

SEQ ID NO: 3099 - DNA, 25 bp, Artificial Sequence
  Synthetic Oligonucleotide
tgtgtgggcgaatggacgcctctta

SEQ ID NO: 3100 - DNA, 25 bp, Artificial Sequence
  Synthetic Oligonucleotide
ggaggttgacgataggccgcttcta

SEQ ID NO: 3101 - DNA, 25 bp, Artificial Sequence
  Synthetic Oligonucleotide
gtcagtttagagttggccggtttag

SEQ ID NO: 3102 - DNA, 25 bp, Artificial Sequence
  Synthetic Oligonucleotide
ccgttatgtagatgtgcctgttcta

SEQ ID NO: 3103 - DNA, 25 bp, Artificial Sequence
  Synthetic Oligonucleotide
ccgaaggacgaggtgcgagacttta

SEQ ID NO: 3104 - DNA, 25 bp, Artificial Sequence
  Synthetic Oligonucleotide
gcaaacgcccgtgataaacgttaga

SEQ ID NO: 3105 - DNA, 25 bp, Artificial Sequence
  Synthetic Oligonucleotide
gaaaaggaggcgtataactatacga

SEQ ID NO: 3106 - DNA, 25 bp, Artificial Sequence
  Synthetic Oligonucleotide
ttagagatggcccgtttagctaaga

SEQ ID NO: 3107 - DNA, 25 bp, Artificial Sequence
  Synthetic Oligonucleotide
gatactacgtcgacacttttttaga

SEQ ID NO: 3108 - DNA, 25 bp, Artificial Sequence
  Synthetic Oligonucleotide
cgagtatcctccactttcatggtac

SEQ ID NO: 3109 - DNA, 25 bp, Artificial Sequence
  Synthetic Oligonucleotide
ccgagtatcctcgtctttcatggta

SEQ ID NO: 3110 - DNA, 25 bp, Artificial Sequence
  Synthetic Oligonucleotide
ttcaactatcccctctttaaactta

SEQ ID NO: 3111 - DNA, 25 bp, Artificial Sequence
  Synthetic Oligonucleotide
ccacttacttcccatctcaaaccta

SEQ ID NO: 3112 - DNA, 25 bp, Artificial Sequence
  Synthetic Oligonucleotide
cgccgattcacacttctcggctctt

SEQ ID NO: 3113 - DNA, 25 bp, Artificial Sequence
  Synthetic Oligonucleotide
agacaattctagtctttccgttctg

SEQ ID NO: 3114 - DNA, 25 bp, Artificial Sequence
  Synthetic Oligonucleotide
gacacatgaggtgctcttccgccta

SEQ ID NO: 3115 - DNA, 25 bp, Artificial Sequence
  Synthetic Oligonucleotide
gacaccagtgctacctcatcggtgc

SEQ ID NO: 3116 - DNA, 25 bp, Artificial Sequence
  Synthetic Oligonucleotide
tccaggagttctacccatcggtcac

SEQ ID NO: 3117 - DNA, 25 bp, Artificial Sequence
  Synthetic Oligonucleotide
gtcacggaaactagtgacttgatga

SEQ ID NO: 3118 - DNA, 25 bp, Artificial Sequence
  Synthetic Oligonucleotide
tgtctcgggtgaaaggctctgtgga

SEQ ID NO: 3119 - DNA, 25 bp, Artificial Sequence
  Synthetic Oligonucleotide
aaccggtccgacgagaacttgagga

SEQ ID NO: 3120 - DNA, 25 bp, Artificial Sequence
  Synthetic Oligonucleotide
tccgagtcagaggtaagcttaagca

SEQ ID NO: 3121 - DNA, 25 bp, Artificial Sequence
  Synthetic Oligonucleotide
tttagtttccgttgctgtagtagca

SEQ ID NO: 3122 - DNA, 25 bp, Artificial Sequence
  Synthetic Oligonucleotide
ctttggtaccatgcggtgataggat

SEQ ID NO: 3123 - DNA, 25 bp, Artificial Sequence
  Synthetic Oligonucleotide
actataggagtaacctccgggggaa

SEQ ID NO: 3124 - DNA, 25 bp, Artificial Sequence
  Synthetic Oligonucleotide
aacattcttatgcttcggggacgaa

SEQ ID NO: 3125 - DNA, 25 bp, Artificial Sequence
  Synthetic Oligonucleotide
agttgcgttcgattactgggcgtga

SEQ ID NO: 3126 - DNA, 25 bp, Artificial Sequence
  Synthetic Oligonucleotide
aatggcgccgaccaccgtggtctga

SEQ ID NO: 3127 - DNA, 25 bp, Artificial Sequence
  Synthetic Oligonucleotide
gagagacccgagcatgatgttgtat

SEQ ID NO: 3128 - DNA, 25 bp, Artificial Sequence
  Synthetic Oligonucleotide
caagaacagcgttaaggttttcgta

SEQ ID NO: 3129 - DNA, 25 bp, Artificial Sequence
  Synthetic Oligonucleotide
ccaagtgtctagctgtggatttggc

SEQ ID NO: 3130 - DNA, 25 bp, Artificial Sequence
  Synthetic Oligonucleotide
taagcggtcgttggtgggttccgga

SEQ ID NO: 3131 - DNA, 25 bp, Artificial Sequence
  Synthetic Oligonucleotide
taagggacacttagggactcacgga

SEQ ID NO: 3132 - DNA, 25 bp, Artificial Sequence
  Synthetic Oligonucleotide
gaagagattcgtgtaggactccgga

SEQ ID NO: 3133 - DNA, 25 bp, Artificial Sequence
  Synthetic Oligonucleotide
ggaggtgtatcccgaagaactggag

SEQ ID NO: 3134 - DNA, 25 bp, Artificial Sequence
  Synthetic Oligonucleotide
tgtgagacttccaggggacctctga

SEQ ID NO: 3135 - DNA, 25 bp, Artificial Sequence
  Synthetic Oligonucleotide
tttcgaccgttgaggggccgacaac

SEQ ID NO: 3136 - DNA, 25 bp, Artificial Sequence
  Synthetic Oligonucleotide
cttgaccgttcgctgcttggtgccc

SEQ ID NO: 3137 - DNA, 25 bp, Artificial Sequence
  Synthetic Oligonucleotide
ctccaggtgtcgtgcgttggccacc

SEQ ID NO: 3138 - DNA, 25 bp, Artificial Sequence
  Synthetic Oligonucleotide
tctcgacaggacttaggtttccccc

SEQ ID NO: 3139 - DNA, 25 bp, Artificial Sequence
  Synthetic Oligonucleotide
tctacggcggctagtggctccggcc

SEQ ID NO: 3140 - DNA, 25 bp, Artificial Sequence
  Synthetic Oligonucleotide
gccacgccggctggaggcttgtgaa

SEQ ID NO: 3141 - DNA, 25 bp, Artificial Sequence
  Synthetic Oligonucleotide
tgcatcttcgcgtgccccttgtgga

SEQ ID NO: 3142 - DNA, 25 bp, Artificial Sequence
  Synthetic Oligonucleotide
gtcttccccgtcactactactggga

SEQ ID NO: 3143 - DNA, 25 bp, Artificial Sequence
  Synthetic Oligonucleotide
cctcacttccctaacagtgaggact

SEQ ID NO: 3144 - DNA, 25 bp, Artificial Sequence
  Synthetic Oligonucleotide
ccgcaattcttgatcgagcacgctt

SEQ ID NO: 3145 - DNA, 25 bp, Artificial Sequence
  Synthetic Oligonucleotide
gcgggacattcttcggtcgggaccc

SEQ ID NO: 3146 - DNA, 25 bp, Artificial Sequence
  Synthetic Oligonucleotide
gcattcgtatacttcgtaggtacaa

SEQ ID NO: 3147 - DNA, 25 bp, Artificial Sequence
  Synthetic Oligonucleotide
cacaaacattcagatgatgtactca

SEQ ID NO: 3148 - DNA, 25 bp, Artificial Sequence
  Synthetic Oligonucleotide
cgcactccatctgtctttggtcgca

SEQ ID NO: 3149 - DNA, 25 bp, Artificial Sequence
  Synthetic Oligonucleotide
agagctaccacctcttctgaggcca

SEQ ID NO: 3150 - DNA, 25 bp, Artificial Sequence
  Synthetic Oligonucleotide
gcatctccctgtggtgacggaccta

SEQ ID NO: 3151 - DNA, 25 bp, Artificial Sequence
  Synthetic Oligonucleotide
ttatgcactgtaccagagataacta

SEQ ID NO: 3152 - DNA, 25 bp, Artificial Sequence
  Synthetic Oligonucleotide
atttatgcctgttctcgcgatacca

SEQ ID NO: 3153 - DNA, 25 bp, Artificial Sequence
  Synthetic Oligonucleotide
ttctaactgccttgtcagaatcgga

SEQ ID NO: 3154 - DNA, 25 bp, Artificial Sequence
  Synthetic Oligonucleotide
cgaactgcgcgttctctaattggta

SEQ ID NO: 3155 - DNA, 25 bp, Artificial Sequence
  Synthetic Oligonucleotide
ccacctgaggactcgtgagggtgta

SEQ ID NO: 3156 - DNA, 25 bp, Artificial Sequence
  Synthetic Oligonucleotide
cctatcagagcctctgaaattacgt

SEQ ID NO: 3157 - DNA, 25 bp, Artificial Sequence
  Synthetic Oligonucleotide
ccttcaagatcctggaaacgattac

SEQ ID NO: 3158 - DNA, 25 bp, Artificial Sequence
  Synthetic Oligonucleotide
acatagtagacgtggacatagatta

SEQ ID NO: 3159 - DNA, 25 bp, Artificial Sequence
  Synthetic Oligonucleotide
gtcgacttacactaggctaacatta

SEQ ID NO: 3160 - DNA, 25 bp, Artificial Sequence
  Synthetic Oligonucleotide
ttcacctaccactgcttcgacagga

SEQ ID NO: 3161 - DNA, 25 bp, Artificial Sequence
  Synthetic Oligonucleotide
aaatcgtcaacctaattatcgggga

SEQ ID NO: 3162 - DNA, 25 bp, Artificial Sequence
  Synthetic Oligonucleotide
tactgtgccaaccacattggggtga

SEQ ID NO: 3163 - DNA, 25 bp, Artificial Sequence
  Synthetic Oligonucleotide
ttgaaccaaaacatctcgaagttga

SEQ ID NO: 3164 - DNA, 25 bp, Artificial Sequence
  Synthetic Oligonucleotide
gagttctgaagagccttcaagttaa

SEQ ID NO: 3165 - DNA, 25 bp, Artificial Sequence
  Synthetic Oligonucleotide
ggtacaccaacgtccctaaacttga

SEQ ID NO: 3166 - DNA, 25 bp, Artificial Sequence
  Synthetic Oligonucleotide
ttatatcacaagtcccaatcgttgg

SEQ ID NO: 3167 - DNA, 25 bp, Artificial Sequence
  Synthetic Oligonucleotide
ggttttcagagtttccgaaacttgg

SEQ ID NO: 3168 - DNA, 25 bp, Artificial Sequence
  Synthetic Oligonucleotide
gttgttggatatagtcaacccgtga

SEQ ID NO: 3169 - DNA, 25 bp, Artificial Sequence
  Synthetic Oligonucleotide
tactgtcgtcgtattgcgaacccca

SEQ ID NO: 3170 - DNA, 25 bp, Artificial Sequence
  Synthetic Oligonucleotide
tcctacagcttcatgtggaacccca

SEQ ID NO: 3171 - DNA, 25 bp, Artificial Sequence
  Synthetic Oligonucleotide
tagaagagcgcctaccggaacccca

SEQ ID NO: 3172 - DNA, 25 bp, Artificial Sequence
  Synthetic Oligonucleotide
tagctggtgcctatgcaaccctcac

SEQ ID NO: 3173 - DNA, 25 bp, Artificial Sequence
  Synthetic Oligonucleotide
agacagttaggagaggcacaggccc

SEQ ID NO: 3174 - DNA, 25 bp, Artificial Sequence
  Synthetic Oligonucleotide
attaggtaagtaggcgcagtgatta

SEQ ID NO: 3175 - DNA, 25 bp, Artificial Sequence
  Synthetic Oligonucleotide
cagtgtgaagtagtaccttaactta

SEQ ID NO: 3176 - DNA, 25 bp, Artificial Sequence
  Synthetic Oligonucleotide
agtggagactgtaaacttatgacta

SEQ ID NO: 3177 - DNA, 25 bp, Artificial Sequence
  Synthetic Oligonucleotide
ggaactactgtagacacctgtacta

SEQ ID NO: 3178 - DNA, 25 bp, Artificial Sequence
  Synthetic Oligonucleotide
aggagtcaagtaacatatacttata

SEQ ID NO: 3179 - DNA, 25 bp, Artificial Sequence
  Synthetic Oligonucleotide
agtgttacaacactaactctcgtta

SEQ ID NO: 3180 - DNA, 25 bp, Artificial Sequence
  Synthetic Oligonucleotide
tacagtccgaagtacaagttactta

SEQ ID NO: 3181 - DNA, 25 bp, Artificial Sequence
  Synthetic Oligonucleotide
tcgtagtggggttaactagaactgc

SEQ ID NO: 3182 - DNA, 25 bp, Artificial Sequence
  Synthetic Oligonucleotide
gtcatgtcggagaagatagaaccta

SEQ ID NO: 3183 - DNA, 25 bp, Artificial Sequence
  Synthetic Oligonucleotide
taccggtggttcacgaaaagaacca

SEQ ID NO: 3184 - DNA, 25 bp, Artificial Sequence
  Synthetic Oligonucleotide
acatagattatcacgaaggaaatca

SEQ ID NO: 3185 - DNA, 25 bp, Artificial Sequence
  Synthetic Oligonucleotide
cagcagttctacgatggcaagtcct

SEQ ID NO: 3186 - DNA, 25 bp, Artificial Sequence
  Synthetic Oligonucleotide
aggacttgccatcgtagaactgctg

SEQ ID NO: 3187 - DNA, 25 bp, Artificial Sequence
  Synthetic Oligonucleotide
ttactagtatctgtagacctaaccc

SEQ ID NO: 3188 - DNA, 25 bp, Artificial Sequence
  Synthetic Oligonucleotide
ttcttctaactcgtcgccaaacgta

SEQ ID NO: 3189 - DNA, 25 bp, Artificial Sequence
  Synthetic Oligonucleotide
gtttctaacactggaataacacgta

SEQ ID NO: 3190 - DNA, 25 bp, Artificial Sequence
  Synthetic Oligonucleotide
ggtgctacggcttcaccagtaccta

SEQ ID NO: 3191 - DNA, 25 bp, Artificial Sequence
  Synthetic Oligonucleotide
ttgtagccgtcatcgccagtatcta

SEQ ID NO: 3192 - DNA, 25 bp, Artificial Sequence
  Synthetic Oligonucleotide
cgtcagagctcaagaacgagtatta

SEQ ID NO: 3193 - DNA, 25 bp, Artificial Sequence
  Synthetic Oligonucleotide
aggacttgccatcgtagaactgctg

SEQ ID NO: 3194 - DNA, 25 bp, Artificial Sequence
  Synthetic Oligonucleotide
cagcagttctacgatggcaagtcct

SEQ ID NO: 3195 - DNA, 25 bp, Artificial Sequence
  Synthetic Oligonucleotide
ggcaagatttaaaccgaactaacta

SEQ ID NO: 3196 - DNA, 25 bp, Artificial Sequence
  Synthetic Oligonucleotide
gaagaagaagagtagccggcgccta

SEQ ID NO: 3197 - DNA, 25 bp, Artificial Sequence
  Synthetic Oligonucleotide
aagaagaagagtagccggcgcctac

SEQ ID NO: 3198 - DNA, 25 bp, Artificial Sequence
  Synthetic Oligonucleotide
gcgtacgcagcgaagatcgggccta

SEQ ID NO: 3199 - DNA, 25 bp, Artificial Sequence
  Synthetic Oligonucleotide
gtaactcgaacgacttgcggcgcta

SEQ ID NO: 3200 - DNA, 25 bp, Artificial Sequence
  Synthetic Oligonucleotide
gacggtcgtctcatcttgggtccta

SEQ ID NO: 3201 - DNA, 25 bp, Artificial Sequence
  Synthetic Oligonucleotide
atgtcgtcgtcgaatttacttggta

SEQ ID NO: 3202 - DNA, 25 bp, Artificial Sequence
  Synthetic Oligonucleotide
gagcagtcgcttcgtcgttcgacga

SEQ ID NO: 3203 - DNA, 25 bp, Artificial Sequence
  Synthetic Oligonucleotide
cgcgtagtagtttggtgtcgcacta

SEQ ID NO: 3204 - DNA, 25 bp, Artificial Sequence
  Synthetic Oligonucleotide
gagtagctcgagtgtcgtacacgta

SEQ ID NO: 3205 - DNA, 25 bp, Artificial Sequence
  Synthetic Oligonucleotide
cagaagactcaccgtcactaccgta

SEQ ID NO: 3206 - DNA, 25 bp, Artificial Sequence
  Synthetic Oligonucleotide
ggagacagtacgaatatccatctag

SEQ ID NO: 3207 - DNA, 25 bp, Artificial Sequence
  Synthetic Oligonucleotide
cattagaaagaatcgtcgaagtcta

SEQ ID NO: 3208 - DNA, 25 bp, Artificial Sequence
  Synthetic Oligonucleotide
ggtgtctaaagatactcatagacta

SEQ ID NO: 3209 - DNA, 25 bp, Artificial Sequence
  Synthetic Oligonucleotide
ggtgtcagaagacccaccgtcacta

SEQ ID NO: 3210 - DNA, 25 bp, Artificial Sequence
  Synthetic Oligonucleotide
ggtgtcagaagacccaccgtcacta

SEQ ID NO: 3211 - DNA, 25 bp, Artificial Sequence
  Synthetic Oligonucleotide
agatcttcgtaaacgccacctgcta

SEQ ID NO: 3212 - DNA, 25 bp, Artificial Sequence
  Synthetic Oligonucleotide
gaatccggaaactgtacacctgcta

SEQ ID NO: 3213 - DNA, 25 bp, Artificial Sequence
  Synthetic Oligonucleotide
attctgcgacgactagaccacccta

SEQ ID NO: 3214 - DNA, 25 bp, Artificial Sequence
  Synthetic Oligonucleotide
gctagtcgactatacgcacttccta

SEQ ID NO: 3215 - DNA, 25 bp, Artificial Sequence
  Synthetic Oligonucleotide
aggacttgccatcgtagaactgctg

SEQ ID NO: 3216 - DNA, 25 bp, Artificial Sequence
  Synthetic Oligonucleotide
cagcagttctacgatggcaagtcct

SEQ ID NO: 3217 - DNA, 25 bp, Artificial Sequence
  Synthetic Oligonucleotide
aggtcgacgtccgacgacaacgcga

SEQ ID NO: 3218 - DNA, 25 bp, Artificial Sequence
  Synthetic Oligonucleotide
ttggtgccgccgtcgcacagactac

SEQ ID NO: 3219 - DNA, 25 bp, Artificial Sequence
  Synthetic Oligonucleotide
gaagtgcaacagttaccacagtcta

SEQ ID NO: 3220 - DNA, 25 bp, Artificial Sequence
  Synthetic Oligonucleotide
atacgtcaagagttacgtcaatgta

SEQ ID NO: 3221 - DNA, 25 bp, Artificial Sequence
  Synthetic Oligonucleotide
tgttacatacgattgtctattcgta

SEQ ID NO: 3222 - DNA, 25 bp, Artificial Sequence
  Synthetic Oligonucleotide
ttgttttacaactagtgcggtctga

SEQ ID NO: 3223 - DNA, 25 bp, Artificial Sequence
  Synthetic Oligonucleotide
ccattctgaccatacgtgggtcttc

SEQ ID NO: 3224 - DNA, 25 bp, Artificial Sequence
  Synthetic Oligonucleotide
tcctgaaagaacagtgcgtcgtata

SEQ ID NO: 3225 - DNA, 25 bp, Artificial Sequence
  Synthetic Oligonucleotide
tactgaaccggcagtccgtcgagta

SEQ ID NO: 3226 - DNA, 25 bp, Artificial Sequence
  Synthetic Oligonucleotide
ggtccagaccagaagtccgtcgcga

SEQ ID NO: 3227 - DNA, 25 bp, Artificial Sequence
  Synthetic Oligonucleotide
gcttacacgacgagtcggtccgcca

SEQ ID NO: 3228 - DNA, 25 bp, Artificial Sequence
  Synthetic Oligonucleotide
ctcgtagaaacgagccccgactcta

SEQ ID NO: 3229 - DNA, 25 bp, Artificial Sequence
  Synthetic Oligonucleotide
tctcaagtgagtagtccgccatcta

SEQ ID NO: 3230 - DNA, 25 bp, Artificial Sequence
  Synthetic Oligonucleotide
gctaaaggaccttacacgaccatta

SEQ ID NO: 3231 - DNA, 25 bp, Artificial Sequence
  Synthetic Oligonucleotide
gagaaagcacactgttacaacatta

SEQ ID NO: 3232 - DNA, 25 bp, Artificial Sequence
  Synthetic Oligonucleotide
gaaatgcgactcttcaaacagagta

SEQ ID NO: 3233 - DNA, 25 bp, Artificial Sequence
  Synthetic Oligonucleotide
aatcggactcgatgtcatataagta

SEQ ID NO: 3234 - DNA, 25 bp, Artificial Sequence
  Synthetic Oligonucleotide
acaaatggccgcttctagttagaga

SEQ ID NO: 3235 - DNA, 25 bp, Artificial Sequence
  Synthetic Oligonucleotide
gaagtagttcatcagtcagtttaga

SEQ ID NO: 3236 - DNA, 25 bp, Artificial Sequence
  Synthetic Oligonucleotide
cggttgtgactactgtcttattaga

SEQ ID NO: 3237 - DNA, 25 bp, Artificial Sequence
  Synthetic Oligonucleotide
aggacttgccatcgtagaactgctg

SEQ ID NO: 3238 - DNA, 25 bp, Artificial Sequence
  Synthetic Oligonucleotide
cagcagttctacgatggcaagtcct

SEQ ID NO: 3239 - DNA, 25 bp, Artificial Sequence
  Synthetic Oligonucleotide
gacagggtcttgagtgagacatcta

SEQ ID NO: 3240 - DNA, 25 bp, Artificial Sequence
  Synthetic Oligonucleotide
gaagtgtagtagtgctcatgccata

SEQ ID NO: 3241 - DNA, 25 bp, Artificial Sequence
  Synthetic Oligonucleotide
tagaagagctgctgccacataggca

SEQ ID NO: 3242 - DNA, 25 bp, Artificial Sequence
  Synthetic Oligonucleotide
aacaggtctgcgaccaatcgtgctc

SEQ ID NO: 3243 - DNA, 25 bp, Artificial Sequence
  Synthetic Oligonucleotide
aacagtgatggagggacttaatcct

SEQ ID NO: 3244 - DNA, 25 bp, Artificial Sequence
  Synthetic Oligonucleotide
ggcagctgctggaacggcttttgct

SEQ ID NO: 3245 - DNA, 25 bp, Artificial Sequence
  Synthetic Oligonucleotide
gattgaccgcttatacacctttttg

SEQ ID NO: 3246 - DNA, 25 bp, Artificial Sequence
  Synthetic Oligonucleotide
tggacagttgtattaaccttcttta

SEQ ID NO: 3247 - DNA, 25 bp, Artificial Sequence
  Synthetic Oligonucleotide
ttagagctttgctcccgtgttaatt

SEQ ID NO: 3248 - DNA, 25 bp, Artificial Sequence
  Synthetic Oligonucleotide
ggttccttgtcctcgacctttattt

SEQ ID NO: 3249 - DNA, 25 bp, Artificial Sequence
  Synthetic Oligonucleotide
gtgttggtattccaagatttctctt

SEQ ID NO: 3250 - DNA, 25 bp, Artificial Sequence
  Synthetic Oligonucleotide
tcgctggtttccttggtattgacta

SEQ ID NO: 3251 - DNA, 25 bp, Artificial Sequence
  Synthetic Oligonucleotide
tcaccgtggttggctaggtttcaga

SEQ ID NO: 3252 - DNA, 25 bp, Artificial Sequence
  Synthetic Oligonucleotide
taaggtcggtctccctaatttccac

SEQ ID NO: 3253 - DNA, 25 bp, Artificial Sequence
  Synthetic Oligonucleotide
ctaggagcgccttcctaaatttcac

SEQ ID NO: 3254 - DNA, 25 bp, Artificial Sequence
  Synthetic Oligonucleotide
cgtgagcccgccatgtaatattcga

SEQ ID NO: 3255 - DNA, 25 bp, Artificial Sequence
  Synthetic Oligonucleotide
ccagaactgcttctagacgtatgga

SEQ ID NO: 3256 - DNA, 25 bp, Artificial Sequence
  Synthetic Oligonucleotide
ccagaactgcttctagacgtatgga

SEQ ID NO: 3257 - DNA, 25 bp, Artificial Sequence
  Synthetic Oligonucleotide
acagaactgcttctagacgtatgga

SEQ ID NO: 3258 - DNA, 25 bp, Artificial Sequence
  Synthetic Oligonucleotide
acagaactgcttctagacgtatgga

SEQ ID NO: 3259 - DNA, 25 bp, Artificial Sequence
  Synthetic Oligonucleotide
aggacttgccatcgtagaactgctg

SEQ ID NO: 3260 - DNA, 25 bp, Artificial Sequence
  Synthetic Oligonucleotide
cagcagttctacgatggcaagtcct

SEQ ID NO: 3261 - DNA, 25 bp, Artificial Sequence
  Synthetic Oligonucleotide
acgacctggctgtgtgtcagttgta

SEQ ID NO: 3262 - DNA, 25 bp, Artificial Sequence
  Synthetic Oligonucleotide
ctggacagggccccggcgtagcaca

SEQ ID NO: 3263 - DNA, 25 bp, Artificial Sequence
  Synthetic Oligonucleotide
ttggacgaagactccggggtgcctc

SEQ ID NO: 3264 - DNA, 25 bp, Artificial Sequence
  Synthetic Oligonucleotide
gcatgtgagacttcctggggacctc

SEQ ID NO: 3265 - DNA, 25 bp, Artificial Sequence
  Synthetic Oligonucleotide
cgctagtggcttacggcgcggcttc

SEQ ID NO: 3266 - DNA, 25 bp, Artificial Sequence
  Synthetic Oligonucleotide
accgtggtctgaacgggaggttaac

SEQ ID NO: 3267 - DNA, 25 bp, Artificial Sequence
  Synthetic Oligonucleotide
accgtggtctgaacgggaggttaac

SEQ ID NO: 3268 - DNA, 25 bp, Artificial Sequence
  Synthetic Oligonucleotide
tacctggactgagtagcatgagtga

SEQ ID NO: 3269 - DNA, 25 bp, Artificial Sequence
  Synthetic Oligonucleotide
tccccgggctgagcagcatgaggac

SEQ ID NO: 3270 - DNA, 25 bp, Artificial Sequence
  Synthetic Oligonucleotide
ctacccggccggagcagcatgagga

SEQ ID NO: 3271 - DNA, 25 bp, Artificial Sequence
  Synthetic Oligonucleotide
tctcctggcctcacctgcttggaga

SEQ ID NO: 3272 - DNA, 25 bp, Artificial Sequence
  Synthetic Oligonucleotide
caggaccccacttgttgttagacga

SEQ ID NO: 3273 - DNA, 25 bp, Artificial Sequence
  Synthetic Oligonucleotide
cacaacttccagagtttgtactaga

SEQ ID NO: 3274 - DNA, 25 bp, Artificial Sequence
  Synthetic Oligonucleotide
caccatttgtaggttacttggtaga

SEQ ID NO: 3275 - DNA, 25 bp, Artificial Sequence
  Synthetic Oligonucleotide
aaacattcttatggttcggggacga

SEQ ID NO: 3276 - DNA, 25 bp, Artificial Sequence
  Synthetic Oligonucleotide
cacaacctcttgagtacgcggagca

SEQ ID NO: 3277 - DNA, 25 bp, Artificial Sequence
  Synthetic Oligonucleotide
atatccatctaggtctcagaagcat

SEQ ID NO: 3278 - DNA, 25 bp, Artificial Sequence
  Synthetic Oligonucleotide
atatgaatctgtacgtaccgaatta

SEQ ID NO: 3279 - DNA, 25 bp, Artificial Sequence
  Synthetic Oligonucleotide
actaagaagccgactactaatgcta

SEQ ID NO: 3280 - DNA, 25 bp, Artificial Sequence
  Synthetic Oligonucleotide
ctatctccgcggttcaaatgcgtac

SEQ ID NO: 3281 - DNA, 25 bp, Artificial Sequence
  Synthetic Oligonucleotide
aggacttgccatcgtagaactgctg

SEQ ID NO: 3282 - DNA, 25 bp, Artificial Sequence
  Synthetic Oligonucleotide
cagcagttctacgatggcaagtcct

SEQ ID NO: 3283 - DNA, 25 bp, Artificial Sequence
  Synthetic Oligonucleotide
ctcgacctagtgttggggactccta

SEQ ID NO: 3284 - DNA, 25 bp, Artificial Sequence
  Synthetic Oligonucleotide
tagcaaaagtcgtcgcgtggccgaa

SEQ ID NO: 3285 - DNA, 25 bp, Artificial Sequence
  Synthetic Oligonucleotide
gctcaagagagttcgcggaaccata

SEQ ID NO: 3286 - DNA, 25 bp, Artificial Sequence
  Synthetic Oligonucleotide
cttcgaaagacttacctgcccaagt

SEQ ID NO: 3287 - DNA, 25 bp, Artificial Sequence
  Synthetic Oligonucleotide
acttcgaaagacttacctgcccaag

SEQ ID NO: 3288 - DNA, 25 bp, Artificial Sequence
  Synthetic Oligonucleotide
cttatggagaaaacctaacccgaag

SEQ ID NO: 3289 - DNA, 25 bp, Artificial Sequence
  Synthetic Oligonucleotide
gggaggaatagaacctagaaccgga

SEQ ID NO: 3290 - DNA, 25 bp, Artificial Sequence
  Synthetic Oligonucleotide
gggtatgaacagaccataaacctag

SEQ ID NO: 3291 - DNA, 25 bp, Artificial Sequence
  Synthetic Oligonucleotide
tgcggtctgaaacgactcaaattta

SEQ ID NO: 3292 - DNA, 25 bp, Artificial Sequence
  Synthetic Oligonucleotide
ggtgttacaaaacatcacaaccttg

SEQ ID NO: 3293 - DNA, 25 bp, Artificial Sequence
  Synthetic Oligonucleotide
gctgttataaaacataaaacttcag

SEQ ID NO: 3294 - DNA, 25 bp, Artificial Sequence
  Synthetic Oligonucleotide
gttaaaaaaccgaaataacccgtag

SEQ ID NO: 3295 - DNA, 25 bp, Artificial Sequence
  Synthetic Oligonucleotide
gttacaaaactgcaagaagtcctca

SEQ ID NO: 3296 - DNA, 25 bp, Artificial Sequence
  Synthetic Oligonucleotide
acttcccacctgaggaagacctaca

SEQ ID NO: 3297 - DNA, 25 bp, Artificial Sequence
  Synthetic Oligonucleotide
ttgcaactaagtcatggaacaccaa

SEQ ID NO: 3298 - DNA, 25 bp, Artificial Sequence
  Synthetic Oligonucleotide
tcgctggaactggtggaacctccac

SEQ ID NO: 3299 - DNA, 25 bp, Artificial Sequence
  Synthetic Oligonucleotide
acggtgcggactactgcaagcccat

SEQ ID NO: 3300 - DNA, 25 bp, Artificial Sequence
  Synthetic Oligonucleotide
gctgggacgaatcgaaggctctagt

SEQ ID NO: 3301 - DNA, 25 bp, Artificial Sequence
  Synthetic Oligonucleotide
accggtggaactactacagacctta

SEQ ID NO: 3302 - DNA, 25 bp, Artificial Sequence
  Synthetic Oligonucleotide
cagcggcggcacagcgtaaacggca

SEQ ID NO: 3303 - DNA, 25 bp, Artificial Sequence
  Synthetic Oligonucleotide
aggacttgccatcgtagaactgctg

SEQ ID NO: 3304 - DNA, 25 bp, Artificial Sequence
  Synthetic Oligonucleotide
cagcagttctacgatggcaagtcct

SEQ ID NO: 3305 - DNA, 25 bp, Artificial Sequence
  Synthetic Oligonucleotide
gtgttacggtttcaacagtacctac

SEQ ID NO: 3306 - DNA, 25 bp, Artificial Sequence
  Synthetic Oligonucleotide
ggggtttcagtgtcaacggtgttac

SEQ ID NO: 3307 - DNA, 25 bp, Artificial Sequence
  Synthetic Oligonucleotide
gtacttgacgtggcatagtaggtta

SEQ ID NO: 3308 - DNA, 25 bp, Artificial Sequence
  Synthetic Oligonucleotide
aagtttgacgtgaacagatcggtta

SEQ ID NO: 3309 - DNA, 25 bp, Artificial Sequence
  Synthetic Oligonucleotide
agtattagaccgaaggttagaccta

SEQ ID NO: 3310 - DNA, 25 bp, Artificial Sequence
  Synthetic Oligonucleotide
ttaaatttcacgttggttagactca

SEQ ID NO: 3311 - DNA, 25 bp, Artificial Sequence
  Synthetic Oligonucleotide
aggacttgccatcgtagaactgctg

SEQ ID NO: 3312 - DNA, 25 bp, Artificial Sequence
  Synthetic Oligonucleotide
cagcagttctacgatggcaagtcct

SEQ ID NO: 3313 - DNA, 25 bp, Artificial Sequence
  Synthetic Oligonucleotide
ttactagtatctctagacctaaccc

SEQ ID NO: 3314 - DNA, 25 bp, Artificial Sequence
  Synthetic Oligonucleotide
ttcttctaactcctcgccaaacgta

SEQ ID NO: 3315 - DNA, 25 bp, Artificial Sequence
  Synthetic Oligonucleotide
gtttctaacactcgaataacacgta

SEQ ID NO: 3316 - DNA, 25 bp, Artificial Sequence
  Synthetic Oligonucleotide
ggtgctacggctacaccagtaccta

SEQ ID NO: 3317 - DNA, 25 bp, Artificial Sequence
  Synthetic Oligonucleotide
ttgtagccgtcaacgccagtatcta

SEQ ID NO: 3318 - DNA, 25 bp, Artificial Sequence
  Synthetic Oligonucleotide
cgtcagagctcatgaacgagtatta

SEQ ID NO: 3319 - DNA, 25 bp, Artificial Sequence
  Synthetic Oligonucleotide
cagcagttctacgatggcaagtcct

SEQ ID NO: 3320 - DNA, 25 bp, Artificial Sequence
  Synthetic Oligonucleotide
aggacttgccatcgtagaactgctg

SEQ ID NO: 3321 - DNA, 25 bp, Artificial Sequence
  Synthetic Oligonucleotide
ggcaagatttaatccgaactaacta

SEQ ID NO: 3322 - DNA, 25 bp, Artificial Sequence
  Synthetic Oligonucleotide
gaagaagaagagaagccggcgccta

SEQ ID NO: 3323 - DNA, 25 bp, Artificial Sequence
  Synthetic Oligonucleotide
aagaagaagagttgccggcgcctac

SEQ ID NO: 3324 - DNA, 25 bp, Artificial Sequence
  Synthetic Oligonucleotide
gcgtacgcagcgtagatcgggccta

SEQ ID NO: 3325 - DNA, 25 bp, Artificial Sequence
  Synthetic Oligonucleotide
gtaactcgaacgtcttgcggcgcta

SEQ ID NO: 3326 - DNA, 25 bp, Artificial Sequence
  Synthetic Oligonucleotide
gacggtcgtctcttcttgggtccta

SEQ ID NO: 3327 - DNA, 25 bp, Artificial Sequence
  Synthetic Oligonucleotide
atgtcgtcgtcgtatttacttggta

SEQ ID NO: 3328 - DNA, 25 bp, Artificial Sequence
  Synthetic Oligonucleotide
gagcagtcgcttggtcgttcgacga

SEQ ID NO: 3329 - DNA, 25 bp, Artificial Sequence
  Synthetic Oligonucleotide
cgcgtagtagttaggtgtcgcacta

SEQ ID NO: 3330 - DNA, 25 bp, Artificial Sequence
  Synthetic Oligonucleotide
gagtagctcgagagtcgtacacgta

SEQ ID NO: 3331 - DNA, 25 bp, Artificial Sequence
  Synthetic Oligonucleotide
cagaagactcacggtcactaccgta

SEQ ID NO: 3332 - DNA, 25 bp, Artificial Sequence
  Synthetic Oligonucleotide
ggagacagtacgtatatccatctag

SEQ ID NO: 3333 - DNA, 25 bp, Artificial Sequence
  Synthetic Oligonucleotide
cattagaaagaaacgtcgaagtcta

SEQ ID NO: 3334 - DNA, 25 bp, Artificial Sequence
  Synthetic Oligonucleotide
ggtgtctaaagaaactcatagacta

SEQ ID NO: 3335 - DNA, 25 bp, Artificial Sequence
  Synthetic Oligonucleotide
ggtgtcagaagagccaccgtcacta

SEQ ID NO: 3336 - DNA, 25 bp, Artificial Sequence
  Synthetic Oligonucleotide
ggtgtcagaagagccaccgtcacta

SEQ ID NO: 3337 - DNA, 25 bp, Artificial Sequence
  Synthetic Oligonucleotide
agatcttcgtaatcgccacctgcta

SEQ ID NO: 3338 - DNA, 25 bp, Artificial Sequence
  Synthetic Oligonucleotide
gaatccggaaacagtacacctgcta

SEQ ID NO: 3339 - DNA, 25 bp, Artificial Sequence
  Synthetic Oligonucleotide
attctgcgacgagtagaccacccta

SEQ ID NO: 3340 - DNA, 25 bp, Artificial Sequence
  Synthetic Oligonucleotide
gctagtcgactaaacgcacttccta

SEQ ID NO: 3341 - DNA, 25 bp, Artificial Sequence
  Synthetic Oligonucleotide
cagcagttctacgatggcaagtcct

SEQ ID NO: 3342 - DNA, 25 bp, Artificial Sequence
  Synthetic Oligonucleotide
aggacttgccatcgtagaactgctg

SEQ ID NO: 3343 - DNA, 25 bp, Artificial Sequence
  Synthetic Oligonucleotide
aggtcgacgtcccacgacaacgcga

SEQ ID NO: 3344 - DNA, 25 bp, Artificial Sequence
  Synthetic Oligonucleotide
ttggtgccgccgacgcacagactac

SEQ ID NO: 3345 - DNA, 25 bp, Artificial Sequence
  Synthetic Oligonucleotide
gaagtgcaacagataccacagtcta

SEQ ID NO: 3346 - DNA, 25 bp, Artificial Sequence
  Synthetic Oligonucleotide
atacgtcaagagatacgtcaatgta

SEQ ID NO: 3347 - DNA, 25 bp, Artificial Sequence
  Synthetic Oligonucleotide
tgttacatacgaatgtctattcgta

SEQ ID NO: 3348 - DNA, 25 bp, Artificial Sequence
  Synthetic Oligonucleotide
ttgttttacaacaagtgcggtctga

SEQ ID NO: 3349 - DNA, 25 bp, Artificial Sequence
  Synthetic Oligonucleotide
ccattctgaccaaacgtgggtcttc

SEQ ID NO: 3350 - DNA, 25 bp, Artificial Sequence
  Synthetic Oligonucleotide
tcctgaaagaactgtgcgtcgtata

SEQ ID NO: 3351 - DNA, 25 bp, Artificial Sequence
  Synthetic Oligonucleotide
tactgaaccggctgtccgtcgagta

SEQ ID NO: 3352 - DNA, 25 bp, Artificial Sequence
  Synthetic Oligonucleotide
ggtccagaccagtagtccgtcgcga

SEQ ID NO: 3353 - DNA, 25 bp, Artificial Sequence
  Synthetic Oligonucleotide
gcttacacgacgtgtcggtccgcca

SEQ ID NO: 3354 - DNA, 25 bp, Artificial Sequence
  Synthetic Oligonucleotide
ctcgtagaaacgtgccccgactcta

SEQ ID NO: 3355 - DNA, 25 bp, Artificial Sequence
  Synthetic Oligonucleotide
tctcaagtgagttgtccgccatcta

SEQ ID NO: 3356 - DNA, 25 bp, Artificial Sequence
  Synthetic Oligonucleotide
gctaaaggacctaacacgaccatta

SEQ ID NO: 3357 - DNA, 25 bp, Artificial Sequence
  Synthetic Oligonucleotide
gagaaagcacacagttacaacatta

SEQ ID NO: 3358 - DNA, 25 bp, Artificial Sequence
  Synthetic Oligonucleotide
gaaatgcgactcatcaaacagagta

SEQ ID NO: 3359 - DNA, 25 bp, Artificial Sequence
  Synthetic Oligonucleotide
aatcggactcgaagtcatataagta

SEQ ID NO: 3360 - DNA, 25 bp, Artificial Sequence
  Synthetic Oligonucleotide
acaaatggccgcatctagttagaga

SEQ ID NO: 3361 - DNA, 25 bp, Artificial Sequence
  Synthetic Oligonucleotide
gaagtagttcatgagtcagtttaga

SEQ ID NO: 3362 - DNA, 25 bp, Artificial Sequence
  Synthetic Oligonucleotide
cggttgtgactagtgtcttattaga

SEQ ID NO: 3363 - DNA, 25 bp, Artificial Sequence
  Synthetic Oligonucleotide
cagcagttctacgatggcaagtcct

SEQ ID NO: 3364 - DNA, 25 bp, Artificial Sequence
  Synthetic Oligonucleotide
aggacttgccatcgtagaactgctg

SEQ ID NO: 3365 - DNA, 25 bp, Artificial Sequence
  Synthetic Oligonucleotide
gacagggtcttgtgtgagacatcta

SEQ ID NO: 3366 - DNA, 25 bp, Artificial Sequence
  Synthetic Oligonucleotide
gaagtgtagtagagctcatgccata

SEQ ID NO: 3367 - DNA, 25 bp, Artificial Sequence
  Synthetic Oligonucleotide
tagaagagctgcagccacataggca

SEQ ID NO: 3368 - DNA, 25 bp, Artificial Sequence
  Synthetic Oligonucleotide
aacaggtctgcgtccaatcgtgctc

SEQ ID NO: 3369 - DNA, 25 bp, Artificial Sequence
  Synthetic Oligonucleotide
aacagtgatggacggacttaatcct

SEQ ID NO: 3370 - DNA, 25 bp, Artificial Sequence
  Synthetic Oligonucleotide
ggcagctgctggtacggcttttgct

SEQ ID NO: 3371 - DNA, 25 bp, Artificial Sequence
  Synthetic Oligonucleotide
gattgaccgcttttacacctttttg

SEQ ID NO: 3372 - DNA, 25 bp, Artificial Sequence
  Synthetic Oligonucleotide
tggacagttgtaataaccttcttta

SEQ ID NO: 3373 - DNA, 25 bp, Artificial Sequence
  Synthetic Oligonucleotide
ttagagctttgcacccgtgttaatt

SEQ ID NO: 3374 - DNA, 25 bp, Artificial Sequence
  Synthetic Oligonucleotide
ggttccttgtccacgacctttattt

SEQ ID NO: 3375 - DNA, 25 bp, Artificial Sequence
  Synthetic Oligonucleotide
gtgttggtattcgaagatttctctt

SEQ ID NO: 3376 - DNA, 25 bp, Artificial Sequence
  Synthetic Oligonucleotide
tcgctggtttccatggtattgacta

SEQ ID NO: 3377 - DNA, 25 bp, Artificial Sequence
  Synthetic Oligonucleotide
tcaccgtggttgcctaggtttcaga

SEQ ID NO: 3378 - DNA, 25 bp, Artificial Sequence
  Synthetic Oligonucleotide
taaggtcggtctgcctaatttccac

SEQ ID NO: 3379 - DNA, 25 bp, Artificial Sequence
  Synthetic Oligonucleotide
ctaggagcgcctacctaaatttcac

SEQ ID NO: 3380 - DNA, 25 bp, Artificial Sequence
  Synthetic Oligonucleotide
cgtgagcccgccttgtaatattcga

SEQ ID NO: 3381 - DNA, 25 bp, Artificial Sequence
  Synthetic Oligonucleotide
ccagaactgcttgtagacgtatgga

SEQ ID NO: 3382 - DNA, 25 bp, Artificial Sequence
  Synthetic Oligonucleotide
ccagaactgcttgtagacgtatgga

SEQ ID NO: 3383 - DNA, 25 bp, Artificial Sequence
  Synthetic Oligonucleotide
acagaactgcttgtagacgtatgga

SEQ ID NO: 3384 - DNA, 25 bp, Artificial Sequence
  Synthetic Oligonucleotide
acagaactgcttgtagacgtatgga

SEQ ID NO: 3385 - DNA, 25 bp, Artificial Sequence
  Synthetic Oligonucleotide
cagcagttctacgatggcaagtcct

SEQ ID NO: 3386 - DNA, 25 bp, Artificial Sequence
  Synthetic Oligonucleotide
aggacttgccatcgtagaactgctg

SEQ ID NO: 3387 - DNA, 25 bp, Artificial Sequence
  Synthetic Oligonucleotide
acgacctggctgagtgtcagttgta

SEQ ID NO: 3388 - DNA, 25 bp, Artificial Sequence
  Synthetic Oligonucleotide
ctggacagggccgcggcgtagcaca

SEQ ID NO: 3389 - DNA, 25 bp, Artificial Sequence
  Synthetic Oligonucleotide
ttggacgaagacaccggggtgcctc

SEQ ID NO: 3390 - DNA, 25 bp, Artificial Sequence
  Synthetic Oligonucleotide
gcatgtgagactacctggggacctc

SEQ ID NO: 3391 - DNA, 25 bp, Artificial Sequence
  Synthetic Oligonucleotide
cgctagtggctttcggcgcggcttc

SEQ ID NO: 3392 - DNA, 25 bp, Artificial Sequence
  Synthetic Oligonucleotide
accgtggtctgatcgggaggttaac

SEQ ID NO: 3393 - DNA, 25 bp, Artificial Sequence
  Synthetic Oligonucleotide
accgtggtctgatcgggaggttaac

SEQ ID NO: 3394 - DNA, 25 bp, Artificial Sequence
  Synthetic Oligonucleotide
tacctggactgactagcatgagtga

SEQ ID NO: 3395 - DNA, 25 bp, Artificial Sequence
  Synthetic Oligonucleotide
tccccgggctgaccagcatgaggac

SEQ ID NO: 3396 - DNA, 25 bp, Artificial Sequence
  Synthetic Oligonucleotide
ctacccggccggtgcagcatgagga

SEQ ID NO: 3397 - DNA, 25 bp, Artificial Sequence
  Synthetic Oligonucleotide
tctcctggcctctcctgcttggaga

SEQ ID NO: 3398 - DNA, 25 bp, Artificial Sequence
  Synthetic Oligonucleotide
caggaccccactagttgttagacga

SEQ ID NO: 3399 - DNA, 25 bp, Artificial Sequence
  Synthetic Oligonucleotide
cacaacttccagtgtttgtactaga

SEQ ID NO: 3400 - DNA, 25 bp, Artificial Sequence
  Synthetic Oligonucleotide
caccatttgtagcttacttggtaga

SEQ ID NO: 3401 - DNA, 25 bp, Artificial Sequence
  Synthetic Oligonucleotide
aaacattcttatcgttcggggacga

SEQ ID NO: 3402 - DNA, 25 bp, Artificial Sequence
  Synthetic Oligonucleotide
cacaacctcttgtgtacgcggagca

SEQ ID NO: 3403 - DNA, 25 bp, Artificial Sequence
  Synthetic Oligonucleotide
atatccatctagctctcagaagcat

SEQ ID NO: 3404 - DNA, 25 bp, Artificial Sequence
  Synthetic Oligonucleotide
atatgaatctgttcgtaccgaatta

SEQ ID NO: 3405 - DNA, 25 bp, Artificial Sequence
  Synthetic Oligonucleotide
actaagaagccgtctactaatgcta

SEQ ID NO: 3406 - DNA, 25 bp, Artificial Sequence
  Synthetic Oligonucleotide
ctatctccgcggatcaaatgcgtac

SEQ ID NO: 3407 - DNA, 25 bp, Artificial Sequence
  Synthetic Oligonucleotide
cagcagttctacgatggcaagtcct

SEQ ID NO: 3408 - DNA, 25 bp, Artificial Sequence
  Synthetic Oligonucleotide
aggacttgccatcgtagaactgctg

SEQ ID NO: 3409 - DNA, 25 bp, Artificial Sequence
  Synthetic Oligonucleotide
ctcgacctagtgatggggactccta

SEQ ID NO: 3410 - DNA, 25 bp, Artificial Sequence
  Synthetic Oligonucleotide
tagcaaaagtcgacgcgtggccgaa

SEQ ID NO: 3411 - DNA, 25 bp, Artificial Sequence
  Synthetic Oligonucleotide
gctcaagagagtacgcggaaccata

SEQ ID NO: 3412 - DNA, 25 bp, Artificial Sequence
  Synthetic Oligonucleotide
cttcgaaagactaacctgcccaagt

SEQ ID NO: 3413 - DNA, 25 bp, Artificial Sequence
  Synthetic Oligonucleotide
acttcgaaagacatacctgcccaag

SEQ ID NO: 3414 - DNA, 25 bp, Artificial Sequence
  Synthetic Oligonucleotide
cttatggagaaatcctaacccgaag

SEQ ID NO: 3415 - DNA, 25 bp, Artificial Sequence
  Synthetic Oligonucleotide
gggaggaatagatcctagaaccgga

SEQ ID NO: 3416 - DNA, 25 bp, Artificial Sequence
  Synthetic Oligonucleotide
gggtatgaacagtccataaacctag

SEQ ID NO: 3417 - DNA, 25 bp, Artificial Sequence
  Synthetic Oligonucleotide
tgcggtctgaaaggactcaaattta

SEQ ID NO: 3418 - DNA, 25 bp, Artificial Sequence
  Synthetic Oligonucleotide
ggtgttacaaaagatcacaaccttg

SEQ ID NO: 3419 - DNA, 25 bp, Artificial Sequence
  Synthetic Oligonucleotide
gctgttataaaagataaaacttcag

SEQ ID NO: 3420 - DNA, 25 bp, Artificial Sequence
  Synthetic Oligonucleotide
gttaaaaaaccgtaataacccgtag

SEQ ID NO: 3421 - DNA, 25 bp, Artificial Sequence
  Synthetic Oligonucleotide
gttacaaaactggaagaagtcctca

SEQ ID NO: 3422 - DNA, 25 bp, Artificial Sequence
  Synthetic Oligonucleotide
acttcccacctgtggaagacctaca

SEQ ID NO: 3423 - DNA, 25 bp, Artificial Sequence
  Synthetic Oligonucleotide
ttgcaactaagtgatggaacaccaa

SEQ ID NO: 3424 - DNA, 25 bp, Artificial Sequence
  Synthetic Oligonucleotide
tcgctggaactgctggaacctccac

SEQ ID NO: 3425 - DNA, 25 bp, Artificial Sequence
  Synthetic Oligonucleotide
acggtgcggacttctgcaagcccat

SEQ ID NO: 3426 - DNA, 25 bp, Artificial Sequence
  Synthetic Oligonucleotide
gctgggacgaatggaaggctctagt

SEQ ID NO: 3427 - DNA, 25 bp, Artificial Sequence
  Synthetic Oligonucleotide
accggtggaacttctacagacctta

SEQ ID NO: 3428 - DNA, 25 bp, Artificial Sequence
  Synthetic Oligonucleotide
cagcggcggcactgcgtaaacggca

SEQ ID NO: 3429 - DNA, 25 bp, Artificial Sequence
  Synthetic Oligonucleotide
cagcagttctacgatggcaagtcct

SEQ ID NO: 3430 - DNA, 25 bp, Artificial Sequence
  Synthetic Oligonucleotide
aggacttgccatcgtagaactgctg

SEQ ID NO: 3431 - DNA, 25 bp, Artificial Sequence
  Synthetic Oligonucleotide
gtgttacggtttgaacagtacctac

SEQ ID NO: 3432 - DNA, 25 bp, Artificial Sequence
  Synthetic Oligonucleotide
ggggtttcagtgacaacggtgttac

SEQ ID NO: 3433 - DNA, 25 bp, Artificial Sequence
  Synthetic Oligonucleotide
gtacttgacgtgccatagtaggtta

SEQ ID NO: 3434 - DNA, 25 bp, Artificial Sequence
  Synthetic Oligonucleotide
aagtttgacgtgtacagatcggtta

SEQ ID NO: 3435 - DNA, 25 bp, Artificial Sequence
  Synthetic Oligonucleotide
agtattagaccgtaggttagaccta

SEQ ID NO: 3436 - DNA, 25 bp, Artificial Sequence
  Synthetic Oligonucleotide
ttaaatttcacgatggttagactca

SEQ ID NO: 3437 - DNA, 25 bp, Artificial Sequence
  Synthetic Oligonucleotide
cagcagttctacgatggcaagtcct

SEQ ID NO: 3438 - DNA, 25 bp, Artificial Sequence
  Synthetic Oligonucleotide
aggacttgccatcgtagaactgctg

SEQ ID NO: 3439 - DNA, 25 bp, Artificial Sequence
  Synthetic Oligonucleotide
caactcggtcagaggttagtgtcga

SEQ ID NO: 3440 - DNA, 25 bp, Artificial Sequence
  Synthetic Oligonucleotide
cagacttgcagtcttctgtcgacta

SEQ ID NO: 3441 - DNA, 25 bp, Artificial Sequence
  Synthetic Oligonucleotide
aagtcatgcataggtattaccacta

SEQ ID NO: 3442 - DNA, 25 bp, Artificial Sequence
  Synthetic Oligonucleotide
gaatcgaaggctctagtctgctcta

SEQ ID NO: 3443 - DNA, 25 bp, Artificial Sequence
  Synthetic Oligonucleotide
gattgagtagtggaagatcagctta

SEQ ID NO: 3444 - DNA, 25 bp, Artificial Sequence
  Synthetic Oligonucleotide
tagaagtagttcatcagtcagttta

SEQ ID NO: 3445 - DNA, 25 bp, Artificial Sequence
  Synthetic Oligonucleotide
gtatgtgttcgactagttagaagta

SEQ ID NO: 3446 - DNA, 25 bp, Artificial Sequence
  Synthetic Oligonucleotide
aggatgtatgtttagtaggtgcata

SEQ ID NO: 3447 - DNA, 25 bp, Artificial Sequence
  Synthetic Oligonucleotide
cccgcgtttgtataaagtcgactta

SEQ ID NO: 3448 - DNA, 25 bp, Artificial Sequence
  Synthetic Oligonucleotide
agcccacaatgtttgagagcaccac

SEQ ID NO: 3449 - DNA, 25 bp, Artificial Sequence
  Synthetic Oligonucleotide
aaattcgaacttcaagagtagcccc

SEQ ID NO: 3450 - DNA, 25 bp, Artificial Sequence
  Synthetic Oligonucleotide
tacgttgtgctcctgaagggccctc

SEQ ID NO: 3451 - DNA, 25 bp, Artificial Sequence
  Synthetic Oligonucleotide
gtgttatggccaccatgccggcctc

SEQ ID NO: 3452 - DNA, 25 bp, Artificial Sequence
  Synthetic Oligonucleotide
tgaagggccacttttcgggttctag

SEQ ID NO: 3453 - DNA, 25 bp, Artificial Sequence
  Synthetic Oligonucleotide
acctcgggtccctacttcaggtttg

SEQ ID NO: 3454 - DNA, 25 bp, Artificial Sequence
  Synthetic Oligonucleotide
gtccaggtcccgtctcctggttgta

SEQ ID NO: 3455 - DNA, 25 bp, Artificial Sequence
  Synthetic Oligonucleotide
tatcagccgaggtctccgaggggta

SEQ ID NO: 3456 - DNA, 25 bp, Artificial Sequence
  Synthetic Oligonucleotide
agcgcgagaaccgaacggcgtagta

SEQ ID NO: 3457 - DNA, 25 bp, Artificial Sequence
  Synthetic Oligonucleotide
aagaaaacgcgaagtcggacgcgta

SEQ ID NO: 3458 - DNA, 25 bp, Artificial Sequence
  Synthetic Oligonucleotide
caagaagtatgcgtgtccagtagta

SEQ ID NO: 3459 - DNA, 25 bp, Artificial Sequence
  Synthetic Oligonucleotide
ccaagatgagacgaccgtccaacga

SEQ ID NO: 3460 - DNA, 25 bp, Artificial Sequence
  Synthetic Oligonucleotide
ctttagtcttagacccgtaccaaga

SEQ ID NO: 3461 - DNA, 25 bp, Artificial Sequence
  Synthetic Oligonucleotide
tctattaccagacgccgtaggaaga

SEQ ID NO: 3462 - DNA, 25 bp, Artificial Sequence
  Synthetic Oligonucleotide
ctccttacggaaggaacaggaccta

SEQ ID NO: 3463 - DNA, 25 bp, Artificial Sequence
  Synthetic Oligonucleotide
ccccttacggaaggaacaggaccta

SEQ ID NO: 3464 - DNA, 25 bp, Artificial Sequence
  Synthetic Oligonucleotide
cccgtccggtaacgtccatcacaca

SEQ ID NO: 3465 - DNA, 25 bp, Artificial Sequence
  Synthetic Oligonucleotide
tcttcgtcgaggtaccggtcctcga

SEQ ID NO: 3466 - DNA, 25 bp, Artificial Sequence
  Synthetic Oligonucleotide
gtgaaccgagagtaccgcgtctcca

SEQ ID NO: 3467 - DNA, 25 bp, Artificial Sequence
  Synthetic Oligonucleotide
tgtgccgctctgtcgccgactcaga

SEQ ID NO: 3468 - DNA, 25 bp, Artificial Sequence
  Synthetic Oligonucleotide
agggtcgtcgccgcgcccttagtac

SEQ ID NO: 3469 - DNA, 25 bp, Artificial Sequence
  Synthetic Oligonucleotide
gttgacgtgacctgccgaatataga

SEQ ID NO: 3470 - DNA, 25 bp, Artificial Sequence
  Synthetic Oligonucleotide
ttgaggagcgcgttcaagtacagta

SEQ ID NO: 3471 - DNA, 25 bp, Artificial Sequence
  Synthetic Oligonucleotide
gagaccgcgacatctagacgtacaa

SEQ ID NO: 3472 - DNA, 25 bp, Artificial Sequence
  Synthetic Oligonucleotide
gacgtaccgacagcagtcgagcaca

SEQ ID NO: 3473 - DNA, 25 bp, Artificial Sequence
  Synthetic Oligonucleotide
ggggacgccgcaagagacagctcta

SEQ ID NO: 3474 - DNA, 25 bp, Artificial Sequence
  Synthetic Oligonucleotide
tctgcgctcccaagcggtagctcta

SEQ ID NO: 3475 - DNA, 25 bp, Artificial Sequence
  Synthetic Oligonucleotide
gttcggtcccctagagagggtcgtc

SEQ ID NO: 3476 - DNA, 25 bp, Artificial Sequence
  Synthetic Oligonucleotide
gtgcatcctcaggaagaccgggtac

SEQ ID NO: 3477 - DNA, 25 bp, Artificial Sequence
  Synthetic Oligonucleotide
ggtgcatcctcaggaagaccgggta

SEQ ID NO: 3478 - DNA, 25 bp, Artificial Sequence
  Synthetic Oligonucleotide
gcggcagcggcctcagctcgtgtta

SEQ ID NO: 3479 - DNA, 25 bp, Artificial Sequence
  Synthetic Oligonucleotide
ggtcagcagactttacagctgagga

SEQ ID NO: 3480 - DNA, 25 bp, Artificial Sequence
  Synthetic Oligonucleotide
tctcatcaacttactcggtgacgga

SEQ ID NO: 3481 - DNA, 25 bp, Artificial Sequence
  Synthetic Oligonucleotide
cctgtcgaacctaccgctgtatgta

SEQ ID NO: 3482 - DNA, 25 bp, Artificial Sequence
  Synthetic Oligonucleotide
gtagctttcaactatcccgtcttta

SEQ ID NO: 3483 - DNA, 25 bp, Artificial Sequence
  Synthetic Oligonucleotide
gaaatcacaagattgaccgcttata

SEQ ID NO: 3484 - DNA, 25 bp, Artificial Sequence
  Synthetic Oligonucleotide
taaaactcaagtgcagatccatata

SEQ ID NO: 3485 - DNA, 25 bp, Artificial Sequence
  Synthetic Oligonucleotide
aaaactttagtatagactcttatga

SEQ ID NO: 3486 - DNA, 25 bp, Artificial Sequence
  Synthetic Oligonucleotide
acgaaattgtaacagctatcataga

SEQ ID NO: 3487 - DNA, 25 bp, Artificial Sequence
  Synthetic Oligonucleotide
gatttgttcagcagctacttatata

SEQ ID NO: 3488 - DNA, 25 bp, Artificial Sequence
  Synthetic Oligonucleotide
gaggttgccgtacctcggtatttaa

SEQ ID NO: 3489 - DNA, 25 bp, Artificial Sequence
  Synthetic Oligonucleotide
cgaggttgccgtacctcggtattta

SEQ ID NO: 3490 - DNA, 25 bp, Artificial Sequence
  Synthetic Oligonucleotide
tagggtttacctgaaccggtcttta

SEQ ID NO: 3491 - DNA, 25 bp, Artificial Sequence
  Synthetic Oligonucleotide
gagtcggaactgccacggtacctta

SEQ ID NO: 3492 - DNA, 25 bp, Artificial Sequence
  Synthetic Oligonucleotide
ggagtcggagggctcatcgacccta

SEQ ID NO: 3493 - DNA, 25 bp, Artificial Sequence
  Synthetic Oligonucleotide
ccgtcgggtgagcacaaccgccgta

SEQ ID NO: 3494 - DNA, 25 bp, Artificial Sequence
  Synthetic Oligonucleotide
acctagcgcctgtcatagtcgccta

SEQ ID NO: 3495 - DNA, 25 bp, Artificial Sequence
  Synthetic Oligonucleotide
acctgtgggtcgtcgacttacacaa

SEQ ID NO: 3496 - DNA, 25 bp, Artificial Sequence
  Synthetic Oligonucleotide
cagctggtgatttcgacgttggaga

SEQ ID NO: 3497 - DNA, 25 bp, Artificial Sequence
  Synthetic Oligonucleotide
caatgtggcttaccagttcatagac

SEQ ID NO: 3498 - DNA, 25 bp, Artificial Sequence
  Synthetic Oligonucleotide
caacggtgttacaaaacatcacaac

SEQ ID NO: 3499 - DNA, 25 bp, Artificial Sequence
  Synthetic Oligonucleotide
tcaacggtgttacaaaacatcacaa

SEQ ID NO: 3500 - DNA, 25 bp, Artificial Sequence
  Synthetic Oligonucleotide
atcctttactcaaaactttactaga

SEQ ID NO: 3501 - DNA, 25 bp, Artificial Sequence
  Synthetic Oligonucleotide
ttcccagctctaaaattcgtacata

SEQ ID NO: 3502 - DNA, 25 bp, Artificial Sequence
  Synthetic Oligonucleotide
tctcgggttttcagaagttgtcata

SEQ ID NO: 3503 - DNA, 25 bp, Artificial Sequence
  Synthetic Oligonucleotide
tcacaagccggtagaagttcgacaa

SEQ ID NO: 3504 - DNA, 25 bp, Artificial Sequence
  Synthetic Oligonucleotide
taccaacaacttcgatggtacacca

SEQ ID NO: 3505 - DNA, 25 bp, Artificial Sequence
  Synthetic Oligonucleotide
ctgcaaccacttacttccgatctca

SEQ ID NO: 3506 - DNA, 25 bp, Artificial Sequence
  Synthetic Oligonucleotide
tctgggacttccattttgagttcta

SEQ ID NO: 3507 - DNA, 25 bp, Artificial Sequence
  Synthetic Oligonucleotide
cggggcgttctaggtttgcctctta

SEQ ID NO: 3508 - DNA, 25 bp, Artificial Sequence
  Synthetic Oligonucleotide
ggggtagatcagaattgctcgaaac

SEQ ID NO: 3509 - DNA, 25 bp, Artificial Sequence
  Synthetic Oligonucleotide
tggaagatcagcttatgatcataga

SEQ ID NO: 3510 - DNA, 25 bp, Artificial Sequence
  Synthetic Oligonucleotide
aagaaataccgtttatgacctcata

SEQ ID NO: 3511 - DNA, 25 bp, Artificial Sequence
  Synthetic Oligonucleotide
caagaaatgtgagtagcacgcttag

SEQ ID NO: 3512 - DNA, 25 bp, Artificial Sequence
  Synthetic Oligonucleotide
tgaggcaagtggtagagtcttccta

SEQ ID NO: 3513 - DNA, 25 bp, Artificial Sequence
  Synthetic Oligonucleotide
ctccagacgggttatattcgctcta

SEQ ID NO: 3514 - DNA, 25 bp, Artificial Sequence
  Synthetic Oligonucleotide
aatcaagacggctttgcgtcgcata

SEQ ID NO: 3515 - DNA, 25 bp, Artificial Sequence
  Synthetic Oligonucleotide
agaacttgaggactggagtccacta

SEQ ID NO: 3516 - DNA, 25 bp, Artificial Sequence
  Synthetic Oligonucleotide
agattgaggtacctgtctgtgatca

SEQ ID NO: 3517 - DNA, 25 bp, Artificial Sequence
  Synthetic Oligonucleotide
ggataaagattcagtctaggatgta

SEQ ID NO: 3518 - DNA, 25 bp, Artificial Sequence
  Synthetic Oligonucleotide
gggcaacattacatcagtacgcata

SEQ ID NO: 3519 - DNA, 25 bp, Artificial Sequence
  Synthetic Oligonucleotide
aggtcatcgatccctcgggaacgta

SEQ ID NO: 3520 - DNA, 25 bp, Artificial Sequence
  Synthetic Oligonucleotide
aaagtgaggtctgtaacaggaagta

SEQ ID NO: 3521 - DNA, 25 bp, Artificial Sequence
  Synthetic Oligonucleotide
accagcaaccgtactagcatgaaga

SEQ ID NO: 3522 - DNA, 25 bp, Artificial Sequence
  Synthetic Oligonucleotide
ctagctaaacgtgcagtcttggcga

SEQ ID NO: 3523 - DNA, 25 bp, Artificial Sequence
  Synthetic Oligonucleotide
tgttcgttcaaaacctggttgagaa

SEQ ID NO: 3524 - DNA, 25 bp, Artificial Sequence
  Synthetic Oligonucleotide
gtagtcatcccattttgattggaca

SEQ ID NO: 3525 - DNA, 25 bp, Artificial Sequence
  Synthetic Oligonucleotide
attcgaagtccattggtccttggca

SEQ ID NO: 3526 - DNA, 25 bp, Artificial Sequence
  Synthetic Oligonucleotide
tccagtccaggtggtgactgtgcaa

SEQ ID NO: 3527 - DNA, 25 bp, Artificial Sequence
  Synthetic Oligonucleotide
cacatgcagtggtcactcccgtaca

SEQ ID NO: 3528 - DNA, 25 bp, Artificial Sequence
  Synthetic Oligonucleotide
actactgtcactgttaactggctta

SEQ ID NO: 3529 - DNA, 25 bp, Artificial Sequence
  Synthetic Oligonucleotide
ctactgcagtttagtagtacgggga

SEQ ID NO: 3530 - DNA, 25 bp, Artificial Sequence
  Synthetic Oligonucleotide
ctactgcagtttagtagtacgggga

SEQ ID NO: 3531 - DNA, 25 bp, Artificial Sequence
  Synthetic Oligonucleotide
taccgaattagaaactctgttcgta

SEQ ID NO: 3532 - DNA, 25 bp, Artificial Sequence
  Synthetic Oligonucleotide
atatcatcgtgaccatggtcgtcta

SEQ ID NO: 3533 - DNA, 25 bp, Artificial Sequence
  Synthetic Oligonucleotide
atgacagtgtaacaacgttcgtaca

SEQ ID NO: 3534 - DNA, 25 bp, Artificial Sequence
  Synthetic Oligonucleotide
tttagctagtcgacagaagactgca

SEQ ID NO: 3535 - DNA, 25 bp, Artificial Sequence
  Synthetic Oligonucleotide
tttttctagtgagtcacttatctga

SEQ ID NO: 3536 - DNA, 25 bp, Artificial Sequence
  Synthetic Oligonucleotide
aaggtttcatcgtactgtttttaga

SEQ ID NO: 3537 - DNA, 25 bp, Artificial Sequence
  Synthetic Oligonucleotide
gggtttacctgaaccggtctttaga

SEQ ID NO: 3538 - DNA, 25 bp, Artificial Sequence
  Synthetic Oligonucleotide
gttaacccgattaagtcgttacaga

SEQ ID NO: 3539 - DNA, 25 bp, Artificial Sequence
  Synthetic Oligonucleotide
taactttccgagttttagttcgaga

SEQ ID NO: 3540 - DNA, 25 bp, Artificial Sequence
  Synthetic Oligonucleotide
acgcaaccggtacctctcgtgcgga

SEQ ID NO: 3541 - DNA, 25 bp, Artificial Sequence
  Synthetic Oligonucleotide
aacggcactaggcctaccgctagga

SEQ ID NO: 3542 - DNA, 25 bp, Artificial Sequence
  Synthetic Oligonucleotide
agagacgactagacctccttacgga

SEQ ID NO: 3543 - DNA, 25 bp, Artificial Sequence
  Synthetic Oligonucleotide
gaagacgtaggacagtcgttacgga

SEQ ID NO: 3544 - DNA, 25 bp, Artificial Sequence
  Synthetic Oligonucleotide
ctgaaactagggccgtagcgcgtga

SEQ ID NO: 3545 - DNA, 25 bp, Artificial Sequence
  Synthetic Oligonucleotide
gtaagcctagggagtacactcagac

SEQ ID NO: 3546 - DNA, 25 bp, Artificial Sequence
  Synthetic Oligonucleotide
gtcactaccgtacctgacaccagta

SEQ ID NO: 3547 - DNA, 25 bp, Artificial Sequence
  Synthetic Oligonucleotide
cttgcgtaccgtgactcgcgtagta

SEQ ID NO: 3548 - DNA, 25 bp, Artificial Sequence
  Synthetic Oligonucleotide
cctgactagtaggacgccgtcgtac

SEQ ID NO: 3549 - DNA, 25 bp, Artificial Sequence
  Synthetic Oligonucleotide
ccaggtggtgactgtgcaaccgtca

SEQ ID NO: 3550 - DNA, 25 bp, Artificial Sequence
  Synthetic Oligonucleotide
cacgtaagggtggttacaacctcta

SEQ ID NO: 3551 - DNA, 25 bp, Artificial Sequence
  Synthetic Oligonucleotide
actcgaagtagtggttgcatcctca

SEQ ID NO: 3552 - DNA, 25 bp, Artificial Sequence
  Synthetic Oligonucleotide
cgtcgaggtactcttgtgatctcaa

SEQ ID NO: 3553 - DNA, 25 bp, Artificial Sequence
  Synthetic Oligonucleotide
cgtcagggaccttggacgatcagta

SEQ ID NO: 3554 - DNA, 25 bp, Artificial Sequence
  Synthetic Oligonucleotide
agcgagggctcgtcgcaagcgacta

SEQ ID NO: 3555 - DNA, 25 bp, Artificial Sequence
  Synthetic Oligonucleotide
caaggactattcacgcacaccacta

SEQ ID NO: 3556 - DNA, 25 bp, Artificial Sequence
  Synthetic Oligonucleotide
caatgatagcgtagacgaaacaata

SEQ ID NO: 3557 - DNA, 25 bp, Artificial Sequence
  Synthetic Oligonucleotide
atagtagtatgtggacaaaccagac

SEQ ID NO: 3558 - DNA, 25 bp, Artificial Sequence
  Synthetic Oligonucleotide
tggctggtactatggaaccacagaa

SEQ ID NO: 3559 - DNA, 25 bp, Artificial Sequence
  Synthetic Oligonucleotide
tgcaactaagtcatggaacaccaaa

SEQ ID NO: 3560 - DNA, 25 bp, Artificial Sequence
  Synthetic Oligonucleotide
gcaaattctcgtgattacgtccaaa

SEQ ID NO: 3561 - DNA, 25 bp, Artificial Sequence
  Synthetic Oligonucleotide
aaggtagtacccaccgtccgagaga

SEQ ID NO: 3562 - DNA, 25 bp, Artificial Sequence
  Synthetic Oligonucleotide
ttaaagggttctaatggccggacag

SEQ ID NO: 3563 - DNA, 25 bp, Artificial Sequence
  Synthetic Oligonucleotide
aggacttgccatcgtagaactgctg

SEQ ID NO: 3564 - DNA, 25 bp, Artificial Sequence
  Synthetic Oligonucleotide
cagcagttctacgatggcaagtcct

SEQ ID NO: 3565 - DNA, 25 bp, Artificial Sequence
  Synthetic Oligonucleotide
caactcggtcagtggttagtgtcga

SEQ ID NO: 3566 - DNA, 25 bp, Artificial Sequence
  Synthetic Oligonucleotide
cagacttgcagtgttctgtcgacta

SEQ ID NO: 3567 - DNA, 25 bp, Artificial Sequence
  Synthetic Oligonucleotide
aagtcatgcatacgtattaccacta

SEQ ID NO: 3568 - DNA, 25 bp, Artificial Sequence
  Synthetic Oligonucleotide
gaatcgaaggctgtagtctgctcta

SEQ ID NO: 3569 - DNA, 25 bp, Artificial Sequence
  Synthetic Oligonucleotide
gattgagtagtgcaagatcagctta

SEQ ID NO: 3570 - DNA, 25 bp, Artificial Sequence
  Synthetic Oligonucleotide
tagaagtagttcttcagtcagttta

SEQ ID NO: 3571 - DNA, 25 bp, Artificial Sequence
  Synthetic Oligonucleotide
gtatgtgttcgagtagttagaagta

SEQ ID NO: 3572 - DNA, 25 bp, Artificial Sequence
  Synthetic Oligonucleotide
aggatgtatgttaagtaggtgcata

SEQ ID NO: 3573 - DNA, 25 bp, Artificial Sequence
  Synthetic Oligonucleotide
cccgcgtttgtaaaaagtcgactta

SEQ ID NO: 3574 - DNA, 25 bp, Artificial Sequence
  Synthetic Oligonucleotide
agcccacaatgtatgagagcaccac

SEQ ID NO: 3575 - DNA, 25 bp, Artificial Sequence
  Synthetic Oligonucleotide
aaattcgaacttgaagagtagcccc

SEQ ID NO: 3576 - DNA, 25 bp, Artificial Sequence
  Synthetic Oligonucleotide
tacgttgtgctcgtgaagggccctc

SEQ ID NO: 3577 - DNA, 25 bp, Artificial Sequence
  Synthetic Oligonucleotide
gtgttatggccagcatgccggcctc

SEQ ID NO: 3578 - DNA, 25 bp, Artificial Sequence
  Synthetic Oligonucleotide
tgaagggccactattcgggttctag

SEQ ID NO: 3579 - DNA, 25 bp, Artificial Sequence
  Synthetic Oligonucleotide
acctcgggtcccaacttcaggtttg

SEQ ID NO: 3580 - DNA, 25 bp, Artificial Sequence
  Synthetic Oligonucleotide
gtccaggtcccgactcctggttgta

SEQ ID NO: 3581 - DNA, 25 bp, Artificial Sequence
  Synthetic Oligonucleotide
tatcagccgaggactccgaggggta

SEQ ID NO: 3582 - DNA, 25 bp, Artificial Sequence
  Synthetic Oligonucleotide
agcgcgagaacccaacggcgtagta

SEQ ID NO: 3583 - DNA, 25 bp, Artificial Sequence
  Synthetic Oligonucleotide
aagaaaacgcgatgtcggacgcgta

SEQ ID NO: 3584 - DNA, 25 bp, Artificial Sequence
  Synthetic Oligonucleotide
caagaagtatgcctgtccagtagta

SEQ ID NO: 3585 - DNA, 25 bp, Artificial Sequence
  Synthetic Oligonucleotide
ccaagatgagaccaccgtccaacga

SEQ ID NO: 3586 - DNA, 25 bp, Artificial Sequence
  Synthetic Oligonucleotide
ctttagtcttagtcccgtaccaaga

SEQ ID NO: 3587 - DNA, 25 bp, Artificial Sequence
  Synthetic Oligonucleotide
tctattaccagaggccgtaggaaga

SEQ ID NO: 3588 - DNA, 25 bp, Artificial Sequence
  Synthetic Oligonucleotide
ctccttacggaacgaacaggaccta

SEQ ID NO: 3589 - DNA, 25 bp, Artificial Sequence
  Synthetic Oligonucleotide
ccccttacggaacgaacaggaccta

SEQ ID NO: 3590 - DNA, 25 bp, Artificial Sequence
  Synthetic Oligonucleotide
cccgtccggtaaggtccatcacaca

SEQ ID NO: 3591 - DNA, 25 bp, Artificial Sequence
  Synthetic Oligonucleotide
tcttcgtcgaggaaccggtcctcga

SEQ ID NO: 3592 - DNA, 25 bp, Artificial Sequence
  Synthetic Oligonucleotide
gtgaaccgagagaaccgcgtctcca

SEQ ID NO: 3593 - DNA, 25 bp, Artificial Sequence
  Synthetic Oligonucleotide
tgtgccgctctgacgccgactcaga

SEQ ID NO: 3594 - DNA, 25 bp, Artificial Sequence
  Synthetic Oligonucleotide
agggtcgtcgccccgcccttagtac

SEQ ID NO: 3595 - DNA, 25 bp, Artificial Sequence
  Synthetic Oligonucleotide
gttgacgtgaccagccgaatataga

SEQ ID NO: 3596 - DNA, 25 bp, Artificial Sequence
  Synthetic Oligonucleotide
ttgaggagcgcgatcaagtacagta

SEQ ID NO: 3597 - DNA, 25 bp, Artificial Sequence
  Synthetic Oligonucleotide
gagaccgcgacaactagacgtacaa

SEQ ID NO: 3598 - DNA, 25 bp, Artificial Sequence
  Synthetic Oligonucleotide
gacgtaccgacaccagtcgagcaca

SEQ ID NO: 3599 - DNA, 25 bp, Artificial Sequence
  Synthetic Oligonucleotide
ggggacgccgcatgagacagctcta

SEQ ID NO: 3600 - DNA, 25 bp, Artificial Sequence
  Synthetic Oligonucleotide
tctgcgctcccatgcggtagctcta

SEQ ID NO: 3601 - DNA, 25 bp, Artificial Sequence
  Synthetic Oligonucleotide
gttcggtccccttgagagggtcgtc

SEQ ID NO: 3602 - DNA, 25 bp, Artificial Sequence
  Synthetic Oligonucleotide
gtgcatcctcagcaagaccgggtac

SEQ ID NO: 3603 - DNA, 25 bp, Artificial Sequence
  Synthetic Oligonucleotide
ggtgcatcctcacgaagaccgggta

SEQ ID NO: 3604 - DNA, 25 bp, Artificial Sequence
  Synthetic Oligonucleotide
gcggcagcggccacagctcgtgtta

SEQ ID NO: 3605 - DNA, 25 bp, Artificial Sequence
  Synthetic Oligonucleotide
ggtcagcagactatacagctgagga

SEQ ID NO: 3606 - DNA, 25 bp, Artificial Sequence
  Synthetic Oligonucleotide
tctcatcaactttctcggtgacgga

SEQ ID NO: 3607 - DNA, 25 bp, Artificial Sequence
  Synthetic Oligonucleotide
cctgtcgaaccttccgctgtatgta

SEQ ID NO: 3608 - DNA, 25 bp, Artificial Sequence
  Synthetic Oligonucleotide
gtagctttcaacaatcccgtcttta

SEQ ID NO: 3609 - DNA, 25 bp, Artificial Sequence
  Synthetic Oligonucleotide
gaaatcacaagaatgaccgcttata

SEQ ID NO: 3610 - DNA, 25 bp, Artificial Sequence
  Synthetic Oligonucleotide
taaaactcaagtccagatccatata

SEQ ID NO: 3611 - DNA, 25 bp, Artificial Sequence
  Synthetic Oligonucleotide
aaaactttagtaaagactcttatga

SEQ ID NO: 3612 - DNA, 25 bp, Artificial Sequence
  Synthetic Oligonucleotide
acgaaattgtaagagctatcataga

SEQ ID NO: 3613 - DNA, 25 bp, Artificial Sequence
  Synthetic Oligonucleotide
gatttgttcagctgctacttatata

SEQ ID NO: 3614 - DNA, 25 bp, Artificial Sequence
  Synthetic Oligonucleotide
gaggttgccgtagctcggtatttaa

SEQ ID NO: 3615 - DNA, 25 bp, Artificial Sequence
  Synthetic Oligonucleotide
cgaggttgccgttcctcggtattta

SEQ ID NO: 3616 - DNA, 25 bp, Artificial Sequence
  Synthetic Oligonucleotide
tagggtttacctcaaccggtcttta

SEQ ID NO: 3617 - DNA, 25 bp, Artificial Sequence
  Synthetic Oligonucleotide
gagtcggaactggcacggtacctta

SEQ ID NO: 3618 - DNA, 25 bp, Artificial Sequence
  Synthetic Oligonucleotide
ggagtcggaggggtcatcgacccta

SEQ ID NO: 3619 - DNA, 25 bp, Artificial Sequence
  Synthetic Oligonucleotide
ccgtcgggtgaggacaaccgccgta

SEQ ID NO: 3620 - DNA, 25 bp, Artificial Sequence
  Synthetic Oligonucleotide
acctagcgcctgacatagtcgccta

SEQ ID NO: 3621 - DNA, 25 bp, Artificial Sequence
  Synthetic Oligonucleotide
acctgtgggtcgacgacttacacaa

SEQ ID NO: 3622 - DNA, 25 bp, Artificial Sequence
  Synthetic Oligonucleotide
cagctggtgattacgacgttggaga

SEQ ID NO: 3623 - DNA, 25 bp, Artificial Sequence
  Synthetic Oligonucleotide
caatgtggcttagcagttcatagac

SEQ ID NO: 3624 - DNA, 25 bp, Artificial Sequence
  Synthetic Oligonucleotide
caacggtgttactaaacatcacaac

SEQ ID NO: 3625 - DNA, 25 bp, Artificial Sequence
  Synthetic Oligonucleotide
tcaacggtgttagaaaacatcacaa

SEQ ID NO: 3626 - DNA, 25 bp, Artificial Sequence
  Synthetic Oligonucleotide
atcctttactcataactttactaga

SEQ ID NO: 3627 - DNA, 25 bp, Artificial Sequence
  Synthetic Oligonucleotide
ttcccagctctataattcgtacata

SEQ ID NO: 3628 - DNA, 25 bp, Artificial Sequence
  Synthetic Oligonucleotide
tctcgggttttctgaagttgtcata

SEQ ID NO: 3629 - DNA, 25 bp, Artificial Sequence
  Synthetic Oligonucleotide
tcacaagccggttgaagttcgacaa

SEQ ID NO: 3630 - DNA, 25 bp, Artificial Sequence
  Synthetic Oligonucleotide
taccaacaacttggatggtacacca

SEQ ID NO: 3631 - DNA, 25 bp, Artificial Sequence
  Synthetic Oligonucleotide
ctgcaaccactttcttccgatctca

SEQ ID NO: 3632 - DNA, 25 bp, Artificial Sequence
  Synthetic Oligonucleotide
tctgggacttcctttttgagttcta

SEQ ID NO: 3633 - DNA, 25 bp, Artificial Sequence
  Synthetic Oligonucleotide
cggggcgttctacgtttgcctctta

SEQ ID NO: 3634 - DNA, 25 bp, Artificial Sequence
  Synthetic Oligonucleotide
ggggtagatcagtattgctcgaaac

SEQ ID NO: 3635 - DNA, 25 bp, Artificial Sequence
  Synthetic Oligonucleotide
tggaagatcagcatatgatcataga

SEQ ID NO: 3636 - DNA, 25 bp, Artificial Sequence
  Synthetic Oligonucleotide
aagaaataccgtatatgacctcata

SEQ ID NO: 3637 - DNA, 25 bp, Artificial Sequence
  Synthetic Oligonucleotide
caagaaatgtgactagcacgcttag

SEQ ID NO: 3638 - DNA, 25 bp, Artificial Sequence
  Synthetic Oligonucleotide
tgaggcaagtggaagagtcttccta

SEQ ID NO: 3639 - DNA, 25 bp, Artificial Sequence
  Synthetic Oligonucleotide
ctccagacgggtaatattcgctcta

SEQ ID NO: 3640 - DNA, 25 bp, Artificial Sequence
  Synthetic Oligonucleotide
aatcaagacggcattgcgtcgcata

SEQ ID NO: 3641 - DNA, 25 bp, Artificial Sequence
  Synthetic Oligonucleotide
agaacttgaggagtggagtccacta

SEQ ID NO: 3642 - DNA, 25 bp, Artificial Sequence
  Synthetic Oligonucleotide
agattgaggtacgtgtctgtgatca

SEQ ID NO: 3643 - DNA, 25 bp, Artificial Sequence
  Synthetic Oligonucleotide
ggataaagattctgtctaggatgta

SEQ ID NO: 3644 - DNA, 25 bp, Artificial Sequence
  Synthetic Oligonucleotide
gggcaacattacttcagtacgcata

SEQ ID NO: 3645 - DNA, 25 bp, Artificial Sequence
  Synthetic Oligonucleotide
aggtcatcgatcgctcgggaacgta

SEQ ID NO: 3646 - DNA, 25 bp, Artificial Sequence
  Synthetic Oligonucleotide
aaagtgaggtctctaacaggaagta

SEQ ID NO: 3647 - DNA, 25 bp, Artificial Sequence
  Synthetic Oligonucleotide
accagcaaccgttctagcatgaaga

SEQ ID NO: 3648 - DNA, 25 bp, Artificial Sequence
  Synthetic Oligonucleotide
ctagctaaacgtccagtcttggcga

SEQ ID NO: 3649 - DNA, 25 bp, Artificial Sequence
  Synthetic Oligonucleotide
tgttcgttcaaatcctggttgagaa

SEQ ID NO: 3650 - DNA, 25 bp, Artificial Sequence
  Synthetic Oligonucleotide
gtagtcatcccaatttgattggaca

SEQ ID NO: 3651 - DNA, 25 bp, Artificial Sequence
  Synthetic Oligonucleotide
attcgaagtccaatggtccttggca

SEQ ID NO: 3652 - DNA, 25 bp, Artificial Sequence
  Synthetic Oligonucleotide
tccagtccaggtcgtgactgtgcaa

SEQ ID NO: 3653 - DNA, 25 bp, Artificial Sequence
  Synthetic Oligonucleotide
cacatgcagtggacactcccgtaca

SEQ ID NO: 3654 - DNA, 25 bp, Artificial Sequence
  Synthetic Oligonucleotide
actactgtcactcttaactggctta

SEQ ID NO: 3655 - DNA, 25 bp, Artificial Sequence
  Synthetic Oligonucleotide
ctactgcagttttgtagtacgggga

SEQ ID NO: 3656 - DNA, 25 bp, Artificial Sequence
  Synthetic Oligonucleotide
ctactgcagttttgtagtacgggga

SEQ ID NO: 3657 - DNA, 25 bp, Artificial Sequence
  Synthetic Oligonucleotide
taccgaattagatactctgttcgta

SEQ ID NO: 3658 - DNA, 25 bp, Artificial Sequence
  Synthetic Oligonucleotide
atatcatcgtgagcatggtcgtcta

SEQ ID NO: 3659 - DNA, 25 bp, Artificial Sequence
  Synthetic Oligonucleotide
atgacagtgtaagaacgttcgtaca

SEQ ID NO: 3660 - DNA, 25 bp, Artificial Sequence
  Synthetic Oligonucleotide
tttagctagtcgtcagaagactgca

SEQ ID NO: 3661 - DNA, 25 bp, Artificial Sequence
  Synthetic Oligonucleotide
tttttctagtgactcacttatctga

SEQ ID NO: 3662 - DNA, 25 bp, Artificial Sequence
  Synthetic Oligonucleotide
aaggtttcatcgaactgtttttaga

SEQ ID NO: 3663 - DNA, 25 bp, Artificial Sequence
  Synthetic Oligonucleotide
gggtttacctgatccggtctttaga

SEQ ID NO: 3664 - DNA, 25 bp, Artificial Sequence
  Synthetic Oligonucleotide
gttaacccgatttagtcgttacaga

SEQ ID NO: 3665 - DNA, 25 bp, Artificial Sequence
  Synthetic Oligonucleotide
taactttccgagatttagttcgaga

SEQ ID NO: 3666 - DNA, 25 bp, Artificial Sequence
  Synthetic Oligonucleotide
acgcaaccggtagctctcgtgcgga

SEQ ID NO: 3667 - DNA, 25 bp, Artificial Sequence
  Synthetic Oligonucleotide
aacggcactagggctaccgctagga

SEQ ID NO: 3668 - DNA, 25 bp, Artificial Sequence
  Synthetic Oligonucleotide
agagacgactagtcctccttacgga

SEQ ID NO: 3669 - DNA, 25 bp, Artificial Sequence
  Synthetic Oligonucleotide
gaagacgtaggagagtcgttacgga

SEQ ID NO: 3670 - DNA, 25 bp, Artificial Sequence
  Synthetic Oligonucleotide
ctgaaactaggggcgtagcgcgtga

SEQ ID NO: 3671 - DNA, 25 bp, Artificial Sequence
  Synthetic Oligonucleotide
gtaagcctagggtgtacactcagac

SEQ ID NO: 3672 - DNA, 25 bp, Artificial Sequence
  Synthetic Oligonucleotide
gtcactaccgtagctgacaccagta

SEQ ID NO: 3673 - DNA, 25 bp, Artificial Sequence
  Synthetic Oligonucleotide
cttgcgtaccgtcactcgcgtagta

SEQ ID NO: 3674 - DNA, 25 bp, Artificial Sequence
  Synthetic Oligonucleotide
cctgactagtagcacgccgtcgtac

SEQ ID NO: 3675 - DNA, 25 bp, Artificial Sequence
  Synthetic Oligonucleotide
ccaggtggtgacagtgcaaccgtca

SEQ ID NO: 3676 - DNA, 25 bp, Artificial Sequence
  Synthetic Oligonucleotide
cacgtaagggtgcttacaacctcta

SEQ ID NO: 3677 - DNA, 25 bp, Artificial Sequence
  Synthetic Oligonucleotide
actcgaagtagtcgttgcatcctca

SEQ ID NO: 3678 - DNA, 25 bp, Artificial Sequence
  Synthetic Oligonucleotide
cgtcgaggtactgttgtgatctcaa

SEQ ID NO: 3679 - DNA, 25 bp, Artificial Sequence
  Synthetic Oligonucleotide
cgtcagggacctaggacgatcagta

SEQ ID NO: 3680 - DNA, 25 bp, Artificial Sequence
  Synthetic Oligonucleotide
agcgagggctcgacgcaagcgacta

SEQ ID NO: 3681 - DNA, 25 bp, Artificial Sequence
  Synthetic Oligonucleotide
caaggactattctcgcacaccacta

SEQ ID NO: 3682 - DNA, 25 bp, Artificial Sequence
  Synthetic Oligonucleotide
caatgatagcgttgacgaaacaata

SEQ ID NO: 3683 - DNA, 25 bp, Artificial Sequence
  Synthetic Oligonucleotide
atagtagtatgtcgacaaaccagac

SEQ ID NO: 3684 - DNA, 25 bp, Artificial Sequence
  Synthetic Oligonucleotide
tggctggtactaaggaaccacagaa

SEQ ID NO: 3685 - DNA, 25 bp, Artificial Sequence
  Synthetic Oligonucleotide
tgcaactaagtcttggaacaccaaa

SEQ ID NO: 3686 - DNA, 25 bp, Artificial Sequence
  Synthetic Oligonucleotide
gcaaattctcgtcattacgtccaaa

SEQ ID NO: 3687 - DNA, 25 bp, Artificial Sequence
  Synthetic Oligonucleotide
aaggtagtaccctccgtccgagaga

SEQ ID NO: 3688 - DNA, 25 bp, Artificial Sequence
  Synthetic Oligonucleotide
ttaaagggttcttatggccggacag

SEQ ID NO: 3689 - DNA, 25 bp, Artificial Sequence
  Synthetic Oligonucleotide
cagcagttctacgatggcaagtcct

SEQ ID NO: 3690 - DNA, 25 bp, Artificial Sequence
  Synthetic Oligonucleotide
aggacttgccatcgtagaactgctg

SEQ ID NO: 3691 - DNA, 25 bp, Artificial Sequence
  Synthetic Oligonucleotide
ggaagttgtcgatcgtgcgtgctta

SEQ ID NO: 3692 - DNA, 25 bp, Artificial Sequence
  Synthetic Oligonucleotide
acgaagttcgaggacgtaccgggga

SEQ ID NO: 3693 - DNA, 25 bp, Artificial Sequence
  Synthetic Oligonucleotide
aactacagtgcgtgctagagggcga

SEQ ID NO: 3694 - DNA, 25 bp, Artificial Sequence
  Synthetic Oligonucleotide
aaaatgggacgtcgacgacggccga

SEQ ID NO: 3695 - DNA, 25 bp, Artificial Sequence
  Synthetic Oligonucleotide
tcgaaaacggcgaagtgagcggcaa

SEQ ID NO: 3696 - DNA, 25 bp, Artificial Sequence
  Synthetic Oligonucleotide
taaagaaggttaatacaactgtcca

SEQ ID NO: 3697 - DNA, 25 bp, Artificial Sequence
  Synthetic Oligonucleotide
gtaactatggttagaagctgtacca

SEQ ID NO: 3698 - DNA, 25 bp, Artificial Sequence
  Synthetic Oligonucleotide
gagtaatggttactaagatagccag

SEQ ID NO: 3699 - DNA, 25 bp, Artificial Sequence
  Synthetic Oligonucleotide
acctttagtttagaagagacctcta

SEQ ID NO: 3700 - DNA, 25 bp, Artificial Sequence
  Synthetic Oligonucleotide
tccattaggtccagtaggacgccca

SEQ ID NO: 3701 - DNA, 25 bp, Artificial Sequence
  Synthetic Oligonucleotide
atccatctaggtctcagaagcattg

SEQ ID NO: 3702 - DNA, 25 bp, Artificial Sequence
  Synthetic Oligonucleotide
attccctcacttcgagaagtcattg

SEQ ID NO: 3703 - DNA, 25 bp, Artificial Sequence
  Synthetic Oligonucleotide
actttggtcctgtaaatgtcggttg

SEQ ID NO: 3704 - DNA, 25 bp, Artificial Sequence
  Synthetic Oligonucleotide
taatgctaccaggatctttggttgt

SEQ ID NO: 3705 - DNA, 25 bp, Artificial Sequence
  Synthetic Oligonucleotide
taccggagtcaaggcttttggttgt

SEQ ID NO: 3706 - DNA, 25 bp, Artificial Sequence
  Synthetic Oligonucleotide
gtaccggagtcaaggcttttggttg

SEQ ID NO: 3707 - DNA, 25 bp, Artificial Sequence
  Synthetic Oligonucleotide
gtataggtccaaggccttagaattg

SEQ ID NO: 3708 - DNA, 25 bp, Artificial Sequence
  Synthetic Oligonucleotide
gagccaaggacggtcagagagtgtg

SEQ ID NO: 3709 - DNA, 25 bp, Artificial Sequence
  Synthetic Oligonucleotide
accacagtaggacctgagaggtcta

SEQ ID NO: 3710 - DNA, 25 bp, Artificial Sequence
  Synthetic Oligonucleotide
cctgtagctgtagtgtgaagtacta

SEQ ID NO: 3711 - DNA, 17 bp, Artificial Sequence
  Synthetic Oligonucleotide
cagttctacgatggcaa

SEQ ID NO: 3712 - DNA, 17 bp, Artificial Sequence
  Synthetic Oligonucleotide
ttgccatcgtagaactg

SEQ ID NO: 3713 - DNA, 17 bp, Artificial Sequence
  Synthetic Oligonucleotide
cagttctacgatggcaa

SEQ ID NO: 3714 - DNA, 17 bp, Artificial Sequence
  Synthetic Oligonucleotide
ttgccatcgtagaactg

SEQ ID NO: 3715 - DNA, 17 bp, Artificial Sequence
  Synthetic Oligonucleotide
agttctacgatggcaag

SEQ ID NO: 3716 - DNA, 17 bp, Artificial Sequence
  Synthetic Oligonucleotide
cttgccatcgtagaact

SEQ ID NO: 3717 - DNA, 17 bp, Artificial Sequence
  Synthetic Oligonucleotide
agttctacgatggcaag

SEQ ID NO: 3718 - DNA, 17 bp, Artificial Sequence
  Synthetic Oligonucleotide
cttgccatcgtagaact

SEQ ID NO: 3719 - DNA, 17 bp, Artificial Sequence
  Synthetic Oligonucleotide
gttctacgatggcaagt

SEQ ID NO: 3720 - DNA, 17 bp, Artificial Sequence
  Synthetic Oligonucleotide
acttgccatcgtagaac

SEQ ID NO: 3721 - DNA, 17 bp, Artificial Sequence
  Synthetic Oligonucleotide
gttctacgatggcaagt

SEQ ID NO: 3722 - DNA, 17 bp, Artificial Sequence
  Synthetic Oligonucleotide
acttgccatcgtagaac

SEQ ID NO: 3723 - DNA, 17 bp, Artificial Sequence
  Synthetic Oligonucleotide
ttctacgatggcaagtc

SEQ ID NO: 3724 - DNA, 17 bp, Artificial Sequence
  Synthetic Oligonucleotide
gacttgccatcgtagaa

SEQ ID NO: 3725 - DNA, 17 bp, Artificial Sequence
  Synthetic Oligonucleotide
ttctacgatggcaagtc

SEQ ID NO: 3726 - DNA, 17 bp, Artificial Sequence
  Synthetic Oligonucleotide
gacttgccatcgtagaa

SEQ ID NO: 3727 - DNA, 25 bp, Artificial Sequence
  Synthetic Oligonucleotide
gttgtaggtctttaggttcagcgac

SEQ ID NO: 3728 - DNA, 25 bp, Artificial Sequence
  Synthetic Oligonucleotide
cgagtaggtcggtccaggtgttggg

SEQ ID NO: 3729 - DNA, 25 bp, Artificial Sequence
  Synthetic Oligonucleotide
agtagttccttccagttgagtagga

SEQ ID NO: 3730 - DNA, 25 bp, Artificial Sequence
  Synthetic Oligonucleotide
tataccgttacctgtgggtcgtcga

SEQ ID NO: 3731 - DNA, 25 bp, Artificial Sequence
  Synthetic Oligonucleotide
ccaagacgtccgtcctccaggtgga

SEQ ID NO: 3732 - DNA, 25 bp, Artificial Sequence
  Synthetic Oligonucleotide
ccaacgaacgcgtgcttgaagagca

SEQ ID NO: 3733 - DNA, 25 bp, Artificial Sequence
  Synthetic Oligonucleotide
acaagaagaccccgttgagagttaa

SEQ ID NO: 3734 - DNA, 25 bp, Artificial Sequence
  Synthetic Oligonucleotide
cagacggtaaacactttggctttag

SEQ ID NO: 3735 - DNA, 25 bp, Artificial Sequence
  Synthetic Oligonucleotide
tcaacttcgagaagttttggttcaa

SEQ ID NO: 3736 - DNA, 25 bp, Artificial Sequence
  Synthetic Oligonucleotide
taaatgtcaacatttacgtttggca

SEQ ID NO: 3737 - DNA, 25 bp, Artificial Sequence
  Synthetic Oligonucleotide
aacatcacaaccttgttatggacta

SEQ ID NO: 3738 - DNA, 25 bp, Artificial Sequence
  Synthetic Oligonucleotide
aattaccttgcgaagtgtatcccta

SEQ ID NO: 3739 - DNA, 25 bp, Artificial Sequence
  Synthetic Oligonucleotide
acttggtagcggtcgtgttccggta

SEQ ID NO: 3740 - DNA, 25 bp, Artificial Sequence
  Synthetic Oligonucleotide
ttctatggggagaacctgacgcgga

SEQ ID NO: 3741 - DNA, 25 bp, Artificial Sequence
  Synthetic Oligonucleotide
aattaagcatacatcttcgacggta

SEQ ID NO: 3742 - DNA, 25 bp, Artificial Sequence
  Synthetic Oligonucleotide
caatttaacgccagagcctggtata

SEQ ID NO: 3743 - DNA, 25 bp, Artificial Sequence
  Synthetic Oligonucleotide
attctgatgctgccatagactagta

SEQ ID NO: 3744 - DNA, 25 bp, Artificial Sequence
  Synthetic Oligonucleotide
tattaaggaatgcctgtagctgtag

SEQ ID NO: 3745 - DNA, 25 bp, Artificial Sequence
  Synthetic Oligonucleotide
atatcgagaggaggcctatgctgta

SEQ ID NO: 3746 - DNA, 25 bp, Artificial Sequence
  Synthetic Oligonucleotide
ctatggtttatacgaagtgctcgta

SEQ ID NO: 3747 - DNA, 25 bp, Artificial Sequence
  Synthetic Oligonucleotide
cgtactggtttccacacagggtcta

SEQ ID NO: 3748 - DNA, 25 bp, Artificial Sequence
  Synthetic Oligonucleotide
gcgtcctctgttggaccaggagtca

SEQ ID NO: 3749 - DNA, 25 bp, Artificial Sequence
  Synthetic Oligonucleotide
acgacgacctggtcaacccagaaca

SEQ ID NO: 3750 - DNA, 25 bp, Artificial Sequence
  Synthetic Oligonucleotide
gacgagacaggaccaaatcaggaaa

SEQ ID NO: 3751 - DNA, 25 bp, Artificial Sequence
  Synthetic Oligonucleotide
gcgggtcatggtcaaatcatcgaaa

SEQ ID NO: 3752 - DNA, 25 bp, Artificial Sequence
  Synthetic Oligonucleotide
gtgggtcaatctttttcgactcaaa

SEQ ID NO: 3753 - DNA, 25 bp, Artificial Sequence
  Synthetic Oligonucleotide
ggccggacatttataactcctcaac

SEQ ID NO: 3754 - DNA, 25 bp, Artificial Sequence
  Synthetic Oligonucleotide
gtgccagattttcaatacctcagta

SEQ ID NO: 3755 - DNA, 25 bp, Artificial Sequence
  Synthetic Oligonucleotide
tcccacggttttcagagtatccgaa

SEQ ID NO: 3756 - DNA, 25 bp, Artificial Sequence
  Synthetic Oligonucleotide
ttgaaacggctttggatgcacgaac

SEQ ID NO: 3757 - DNA, 25 bp, Artificial Sequence
  Synthetic Oligonucleotide
tcaaatagcttccgtgcctagagaa

SEQ ID NO: 3758 - DNA, 25 bp, Artificial Sequence
  Synthetic Oligonucleotide
caaataatctgctgctgtaggtata

SEQ ID NO: 3759 - DNA, 25 bp, Artificial Sequence
  Synthetic Oligonucleotide
agcaactgtcgctgctcgagttgta

SEQ ID NO: 3760 - DNA, 25 bp, Artificial Sequence
  Synthetic Oligonucleotide
taagtaacttgttcttcggactgta

SEQ ID NO: 3761 - DNA, 25 bp, Artificial Sequence
  Synthetic Oligonucleotide
gtataagtaacagtatggtccttta

SEQ ID NO: 3762 - DNA, 25 bp, Artificial Sequence
  Synthetic Oligonucleotide
ctaaaaacagcgtaggcacctatac

SEQ ID NO: 3763 - DNA, 25 bp, Artificial Sequence
  Synthetic Oligonucleotide
tacaagaagaaggaagagcgctcaa

SEQ ID NO: 3764 - DNA, 25 bp, Artificial Sequence
  Synthetic Oligonucleotide
tggacttggaaagactgggttacca

SEQ ID NO: 3765 - DNA, 25 bp, Artificial Sequence
  Synthetic Oligonucleotide
gacatcagagaagactaggttccca

SEQ ID NO: 3766 - DNA, 25 bp, Artificial Sequence
  Synthetic Oligonucleotide
tctactacgaaactgtcttccgata

SEQ ID NO: 3767 - DNA, 25 bp, Artificial Sequence
  Synthetic Oligonucleotide
cctctctcaatccttggtcagacga

SEQ ID NO: 3768 - DNA, 25 bp, Artificial Sequence
  Synthetic Oligonucleotide
acccttcatctgtcagtacagacga

SEQ ID NO: 3769 - DNA, 25 bp, Artificial Sequence
  Synthetic Oligonucleotide
acaccactcgtgtcagtcacgtcga

SEQ ID NO: 3770 - DNA, 25 bp, Artificial Sequence
  Synthetic Oligonucleotide
tgcaacagttaccacagtctactga

SEQ ID NO: 3771 - DNA, 25 bp, Artificial Sequence
  Synthetic Oligonucleotide
tgtcatgacctacacccactacgta

SEQ ID NO: 3772 - DNA, 25 bp, Artificial Sequence
  Synthetic Oligonucleotide
ggaccgtgtacttcaacccatacta

SEQ ID NO: 3773 - DNA, 25 bp, Artificial Sequence
  Synthetic Oligonucleotide
cctacgcttacatcacgactgcgta

SEQ ID NO: 3774 - DNA, 25 bp, Artificial Sequence
  Synthetic Oligonucleotide
cgcgctgtcgctacagccgatgcga

SEQ ID NO: 3775 - DNA, 25 bp, Artificial Sequence
  Synthetic Oligonucleotide
ggctacggatgctcgcagacgacga

SEQ ID NO: 3776 - DNA, 25 bp, Artificial Sequence
  Synthetic Oligonucleotide
gttgagctgagaagcttccgtgaaa

SEQ ID NO: 3777 - DNA, 25 bp, Artificial Sequence
  Synthetic Oligonucleotide
gttatcaaatagcttccgtgcctag

SEQ ID NO: 3778 - DNA, 25 bp, Artificial Sequence
  Synthetic Oligonucleotide
agtacgaatatccatctaggtctca

SEQ ID NO: 3779 - DNA, 25 bp, Artificial Sequence
  Synthetic Oligonucleotide
taggaatgtaagatcatctactaca

SEQ ID NO: 3780 - DNA, 25 bp, Artificial Sequence
  Synthetic Oligonucleotide
tgtagtagatgatcttacattccta

SEQ ID NO: 3781 - DNA, 25 bp, Artificial Sequence
  Synthetic Oligonucleotide
ttacgtagagtataaaccttactga

SEQ ID NO: 3782 - DNA, 25 bp, Artificial Sequence
  Synthetic Oligonucleotide
ttacgactagtgtttacccgtggga

SEQ ID NO: 3783 - DNA, 25 bp, Artificial Sequence
  Synthetic Oligonucleotide
tacacatttacatcgacgacctgga

SEQ ID NO: 3784 - DNA, 25 bp, Artificial Sequence
  Synthetic Oligonucleotide
agatcttcgtaaacgctacctgcta

SEQ ID NO: 3785 - DNA, 25 bp, Artificial Sequence
  Synthetic Oligonucleotide
agtacatacgaagatacgtcaacta

SEQ ID NO: 3786 - DNA, 25 bp, Artificial Sequence
  Synthetic Oligonucleotide
ggtaaacgtacacaacaatgcaata

SEQ ID NO: 3787 - DNA, 25 bp, Artificial Sequence
  Synthetic Oligonucleotide
gaggttaaccaggaacaatttccta

SEQ ID NO: 3788 - DNA, 25 bp, Artificial Sequence
  Synthetic Oligonucleotide
cggtcaaccaggtcaaaactaccga

SEQ ID NO: 3789 - DNA, 25 bp, Artificial Sequence
  Synthetic Oligonucleotide
ggccacaccgcgtcgaacttcaaga

SEQ ID NO: 3790 - DNA, 25 bp, Artificial Sequence
  Synthetic Oligonucleotide
gaatcgttcccctcgttccgtcaaa

SEQ ID NO: 3791 - DNA, 25 bp, Artificial Sequence
  Synthetic Oligonucleotide
gaaccgttctcctcgttccgtcaaa

SEQ ID NO: 3792 - DNA, 25 bp, Artificial Sequence
  Synthetic Oligonucleotide
agaagtggaccgacttccgtcaggc

SEQ ID NO: 3793 - DNA, 25 bp, Artificial Sequence
  Synthetic Oligonucleotide
agcagccgctcgaccggcgtcagga

SEQ ID NO: 3794 - DNA, 25 bp, Artificial Sequence
  Synthetic Oligonucleotide
cgagcggtaccgaatcggaccttga

SEQ ID NO: 3795 - DNA, 25 bp, Artificial Sequence
  Synthetic Oligonucleotide
gtagggacaccttcgtgtaacatga

SEQ ID NO: 3796 - DNA, 25 bp, Artificial Sequence
  Synthetic Oligonucleotide
ggtcgcagacctgttgtaccgatga

SEQ ID NO: 3797 - DNA, 25 bp, Artificial Sequence
  Synthetic Oligonucleotide
ctaccaacactcggtggtacaccaa

SEQ ID NO: 3798 - DNA, 25 bp, Artificial Sequence
  Synthetic Oligonucleotide
gcgcggacgacggaaggaacctaca

SEQ ID NO: 3799 - DNA, 25 bp, Artificial Sequence
  Synthetic Oligonucleotide
gccgggaccggaacggctactccta

SEQ ID NO: 3800 - DNA, 25 bp, Artificial Sequence
  Synthetic Oligonucleotide
tcctcgaaggtaaggctactcgcta

SEQ ID NO: 3801 - DNA, 25 bp, Artificial Sequence
  Synthetic Oligonucleotide
cttctgtcgactagctaaaatcgca

SEQ ID NO: 3802 - DNA, 25 bp, Artificial Sequence
  Synthetic Oligonucleotide
gcttcttgctctacttcacagctga

SEQ ID NO: 3803 - DNA, 25 bp, Artificial Sequence
  Synthetic Oligonucleotide
gcgtcttggtctacttctcatctga

SEQ ID NO: 3804 - DNA, 25 bp, Artificial Sequence
  Synthetic Oligonucleotide
tgcattagttgcgttcgactactga

SEQ ID NO: 3805 - DNA, 25 bp, Artificial Sequence
  Synthetic Oligonucleotide
agcaactgccgctgctcgagctgta

SEQ ID NO: 3806 - DNA, 25 bp, Artificial Sequence
  Synthetic Oligonucleotide
agcaactgccgctgctcgagctgta

SEQ ID NO: 3807 - DNA, 25 bp, Artificial Sequence
  Synthetic Oligonucleotide
aacattagtctctcgcacgcgggta

SEQ ID NO: 3808 - DNA, 25 bp, Artificial Sequence
  Synthetic Oligonucleotide
taaaaggttctctactcgagcaata

SEQ ID NO: 3809 - DNA, 25 bp, Artificial Sequence
  Synthetic Oligonucleotide
aataaggttatcagtacaagcaaga

SEQ ID NO: 3810 - DNA, 25 bp, Artificial Sequence
  Synthetic Oligonucleotide
taagccggtttaaccgaggtcaaga

SEQ ID NO: 3811 - DNA, 25 bp, Artificial Sequence
  Synthetic Oligonucleotide
aacgccctctctacgcgaattaaga

SEQ ID NO: 3812 - DNA, 25 bp, Artificial Sequence
  Synthetic Oligonucleotide
gcaaccacttacttccgatctcaaa

SEQ ID NO: 3813 - DNA, 25 bp, Artificial Sequence
  Synthetic Oligonucleotide
ggtctacttcagtcactccgacata

SEQ ID NO: 3814 - DNA, 25 bp, Artificial Sequence
  Synthetic Oligonucleotide
ggtcgcttctactctgcaacgacta

SEQ ID NO: 3815 - DNA, 25 bp, Artificial Sequence
  Synthetic Oligonucleotide
aggacttgccatcgtagaactgctg

SEQ ID NO: 3816 - DNA, 25 bp, Artificial Sequence
  Synthetic Oligonucleotide
cagcagttctacgatggcaagtcct

SEQ ID NO: 3817 - DNA, 25 bp, Artificial Sequence
  Synthetic Oligonucleotide
ggaagttgtcgaacgtgcgtgctta

SEQ ID NO: 3818 - DNA, 25 bp, Artificial Sequence
  Synthetic Oligonucleotide
acgaagttcgagcacgtaccgggga

SEQ ID NO: 3819 - DNA, 25 bp, Artificial Sequence
  Synthetic Oligonucleotide
aactacagtgcgagctagagggcga

SEQ ID NO: 3820 - DNA, 25 bp, Artificial Sequence
  Synthetic Oligonucleotide
aaaatgggacgtggacgacggccga

SEQ ID NO: 3821 - DNA, 25 bp, Artificial Sequence
  Synthetic Oligonucleotide
tcgaaaacggcgtagtgagcggcaa

SEQ ID NO: 3822 - DNA, 25 bp, Artificial Sequence
  Synthetic Oligonucleotide
taaagaaggttattacaactgtcca

SEQ ID NO: 3823 - DNA, 25 bp, Artificial Sequence
  Synthetic Oligonucleotide
gtaactatggtttgaagctgtacca

SEQ ID NO: 3824 - DNA, 25 bp, Artificial Sequence
  Synthetic Oligonucleotide
gagtaatggttagtaagatagccag

SEQ ID NO: 3825 - DNA, 25 bp, Artificial Sequence
  Synthetic Oligonucleotide
acctttagtttacaagagacctcta

SEQ ID NO: 3826 - DNA, 25 bp, Artificial Sequence
  Synthetic Oligonucleotide
tccattaggtcctgtaggacgccca

SEQ ID NO: 3827 - DNA, 25 bp, Artificial Sequence
  Synthetic Oligonucleotide
atccatctaggtgtcagaagcattg

SEQ ID NO: 3828 - DNA, 25 bp, Artificial Sequence
  Synthetic Oligonucleotide
attccctcacttggagaagtcattg

SEQ ID NO: 3829 - DNA, 25 bp, Artificial Sequence
  Synthetic Oligonucleotide
actttggtcctgaaaatgtcggttg

SEQ ID NO: 3830 - DNA, 25 bp, Artificial Sequence
  Synthetic Oligonucleotide
taatgctaccagcatctttggttgt

SEQ ID NO: 3831 - DNA, 25 bp, Artificial Sequence
  Synthetic Oligonucleotide
taccggagtcaacgcttttggttgt

SEQ ID NO: 3832 - DNA, 25 bp, Artificial Sequence
  Synthetic Oligonucleotide
gtaccggagtcatggcttttggttg

SEQ ID NO: 3833 - DNA, 25 bp, Artificial Sequence
  Synthetic Oligonucleotide
gtataggtccaacgccttagaattg

SEQ ID NO: 3834 - DNA, 25 bp, Artificial Sequence
  Synthetic Oligonucleotide
gagccaaggacgctcagagagtgtg

SEQ ID NO: 3835 - DNA, 25 bp, Artificial Sequence
  Synthetic Oligonucleotide
accacagtaggagctgagaggtcta

SEQ ID NO: 3836 - DNA, 25 bp, Artificial Sequence
  Synthetic Oligonucleotide
cctgtagctgtactgtgaagtacta

SEQ ID NO: 3837 - DNA, 17 bp, Artificial Sequence
  Synthetic Oligonucleotide
ttgccatcgtagaactg

SEQ ID NO: 3838 - DNA, 17 bp, Artificial Sequence
  Synthetic Oligonucleotide
cagttctacgatggcaa

SEQ ID NO: 3839 - DNA, 17 bp, Artificial Sequence
  Synthetic Oligonucleotide
ttgccatcgtagaactg

SEQ ID NO: 3840 - DNA, 17 bp, Artificial Sequence
  Synthetic Oligonucleotide
cagttctacgatggcaa

SEQ ID NO: 3841 - DNA, 17 bp, Artificial Sequence
  Synthetic Oligonucleotide
cttgccatcgtagaact

SEQ ID NO: 3842 - DNA, 17 bp, Artificial Sequence
  Synthetic Oligonucleotide
agttctacgatggcaag

SEQ ID NO: 3843 - DNA, 17 bp, Artificial Sequence
  Synthetic Oligonucleotide
cttgccatcgtagaact

SEQ ID NO: 3844 - DNA, 17 bp, Artificial Sequence
  Synthetic Oligonucleotide
agttctacgatggcaag

SEQ ID NO: 3845 - DNA, 17 bp, Artificial Sequence
  Synthetic Oligonucleotide
acttgccatcgtagaac

SEQ ID NO: 3846 - DNA, 17 bp, Artificial Sequence
  Synthetic Oligonucleotide
gttctacgatggcaagt

SEQ ID NO: 3847 - DNA, 17 bp, Artificial Sequence
  Synthetic Oligonucleotide
acttgccatcgtagaac

SEQ ID NO: 3848 - DNA, 17 bp, Artificial Sequence
  Synthetic Oligonucleotide
gttctacgatggcaagt

SEQ ID NO: 3849 - DNA, 17 bp, Artificial Sequence
  Synthetic Oligonucleotide
gacttgccatcgtagaa

SEQ ID NO: 3850 - DNA, 17 bp, Artificial Sequence
  Synthetic Oligonucleotide
ttctacgatggcaagtc

SEQ ID NO: 3851 - DNA, 17 bp, Artificial Sequence
  Synthetic Oligonucleotide
gacttgccatcgtagaa

SEQ ID NO: 3852 - DNA, 17 bp, Artificial Sequence
  Synthetic Oligonucleotide
ttctacgatggcaagtc

SEQ ID NO: 3853 - DNA, 25 bp, Artificial Sequence
  Synthetic Oligonucleotide
gttgtaggtcttaaggttcagcgac

SEQ ID NO: 3854 - DNA, 25 bp, Artificial Sequence
  Synthetic Oligonucleotide
cgagtaggtcggaccaggtgttggg

SEQ ID NO: 3855 - DNA, 25 bp, Artificial Sequence
  Synthetic Oligonucleotide
agtagttccttcgagttgagtagga

SEQ ID NO: 3856 - DNA, 25 bp, Artificial Sequence
  Synthetic Oligonucleotide
tataccgttaccagtgggtcgtcga

SEQ ID NO: 3857 - DNA, 25 bp, Artificial Sequence
  Synthetic Oligonucleotide
ccaagacgtccgacctccaggtgga

SEQ ID NO: 3858 - DNA, 25 bp, Artificial Sequence
  Synthetic Oligonucleotide
ccaacgaacgcgagcttgaagagca

SEQ ID NO: 3859 - DNA, 25 bp, Artificial Sequence
  Synthetic Oligonucleotide
acaagaagacccggttgagagttaa

SEQ ID NO: 3860 - DNA, 25 bp, Artificial Sequence
  Synthetic Oligonucleotide
cagacggtaaactctttggctttag

SEQ ID NO: 3861 - DNA, 25 bp, Artificial Sequence
  Synthetic Oligonucleotide
tcaacttcgagatgttttggttcaa

SEQ ID NO: 3862 - DNA, 25 bp, Artificial Sequence
  Synthetic Oligonucleotide
taaatgtcaacaattacgtttggca

SEQ ID NO: 3863 - DNA, 25 bp, Artificial Sequence
  Synthetic Oligonucleotide
aacatcacaaccatgttatggacta

SEQ ID NO: 3864 - DNA, 25 bp, Artificial Sequence
  Synthetic Oligonucleotide
aattaccttgcgtagtgtatcccta

SEQ ID NO: 3865 - DNA, 25 bp, Artificial Sequence
  Synthetic Oligonucleotide
acttggtagcggacgtgttccggta

SEQ ID NO: 3866 - DNA, 25 bp, Artificial Sequence
  Synthetic Oligonucleotide
ttctatggggagtacctgacgcgga

SEQ ID NO: 3867 - DNA, 25 bp, Artificial Sequence
  Synthetic Oligonucleotide
aattaagcatacttcttcgacggta

SEQ ID NO: 3868 - DNA, 25 bp, Artificial Sequence
  Synthetic Oligonucleotide
caatttaacgcctgagcctggtata

SEQ ID NO: 3869 - DNA, 25 bp, Artificial Sequence
  Synthetic Oligonucleotide
attctgatgctggcatagactagta

SEQ ID NO: 3870 - DNA, 25 bp, Artificial Sequence
  Synthetic Oligonucleotide
tattaaggaatggctgtagctgtag

SEQ ID NO: 3871 - DNA, 25 bp, Artificial Sequence
  Synthetic Oligonucleotide
atatcgagaggacgcctatgctgta

SEQ ID NO: 3872 - DNA, 25 bp, Artificial Sequence
  Synthetic Oligonucleotide
ctatggtttataggaagtgctcgta

SEQ ID NO: 3873 - DNA, 25 bp, Artificial Sequence
  Synthetic Oligonucleotide
cgtactggtttcgacacagggtcta

SEQ ID NO: 3874 - DNA, 25 bp, Artificial Sequence
  Synthetic Oligonucleotide
gcgtcctctgttcgaccaggagtca

SEQ ID NO: 3875 - DNA, 25 bp, Artificial Sequence
  Synthetic Oligonucleotide
acgacgacctggacaacccagaaca

SEQ ID NO: 3876 - DNA, 25 bp, Artificial Sequence
  Synthetic Oligonucleotide
gacgagacaggagcaaatcaggaaa

SEQ ID NO: 3877 - DNA, 25 bp, Artificial Sequence
  Synthetic Oligonucleotide
gcgggtcatggtgaaatcatcgaaa

SEQ ID NO: 3878 - DNA, 25 bp, Artificial Sequence
  Synthetic Oligonucleotide
gtgggtcaatctatttcgactcaaa

SEQ ID NO: 3879 - DNA, 25 bp, Artificial Sequence
  Synthetic Oligonucleotide
ggccggacatttttaactcctcaac

SEQ ID NO: 3880 - DNA, 25 bp, Artificial Sequence
  Synthetic Oligonucleotide
gtgccagattttgaatacctcagta

SEQ ID NO: 3881 - DNA, 25 bp, Artificial Sequence
  Synthetic Oligonucleotide
tcccacggttttgagagtatccgaa

SEQ ID NO: 3882 - DNA, 25 bp, Artificial Sequence
  Synthetic Oligonucleotide
ttgaaacggcttaggatgcacgaac

SEQ ID NO: 3883 - DNA, 25 bp, Artificial Sequence
  Synthetic Oligonucleotide
tcaaatagcttcggtgcctagagaa

SEQ ID NO: 3884 - DNA, 25 bp, Artificial Sequence
  Synthetic Oligonucleotide
caaataatctgcagctgtaggtata

SEQ ID NO: 3885 - DNA, 25 bp, Artificial Sequence
  Synthetic Oligonucleotide
agcaactgtcgcagctcgagttgta

SEQ ID NO: 3886 - DNA, 25 bp, Artificial Sequence
  Synthetic Oligonucleotide
taagtaacttgtacttcggactgta

SEQ ID NO: 3887 - DNA, 25 bp, Artificial Sequence
  Synthetic Oligonucleotide
gtataagtaacactatggtccttta

SEQ ID NO: 3888 - DNA, 25 bp, Artificial Sequence
  Synthetic Oligonucleotide
ctaaaaacagcgaaggcacctatac

SEQ ID NO: 3889 - DNA, 25 bp, Artificial Sequence
  Synthetic Oligonucleotide
tacaagaagaagcaagagcgctcaa

SEQ ID NO: 3890 - DNA, 25 bp, Artificial Sequence
  Synthetic Oligonucleotide
tggacttggaaacactgggttacca

SEQ ID NO: 3891 - DNA, 25 bp, Artificial Sequence
  Synthetic Oligonucleotide
gacatcagagaacactaggttccca

SEQ ID NO: 3892 - DNA, 25 bp, Artificial Sequence
  Synthetic Oligonucleotide
tctactacgaaagtgtcttccgata

SEQ ID NO: 3893 - DNA, 25 bp, Artificial Sequence
  Synthetic Oligonucleotide
cctctctcaatcgttggtcagacga

SEQ ID NO: 3894 - DNA, 25 bp, Artificial Sequence
  Synthetic Oligonucleotide
acccttcatctgacagtacagacga

SEQ ID NO: 3895 - DNA, 25 bp, Artificial Sequence
  Synthetic Oligonucleotide
acaccactcgtgacagtcacgtcga

SEQ ID NO: 3896 - DNA, 25 bp, Artificial Sequence
  Synthetic Oligonucleotide
tgcaacagttacgacagtctactga

SEQ ID NO: 3897 - DNA, 25 bp, Artificial Sequence
  Synthetic Oligonucleotide
tgtcatgacctagacccactacgta

SEQ ID NO: 3898 - DNA, 25 bp, Artificial Sequence
  Synthetic Oligonucleotide
ggaccgtgtactacaacccatacta

SEQ ID NO: 3899 - DNA, 25 bp, Artificial Sequence
  Synthetic Oligonucleotide
cctacgcttacaacacgactgcgta

SEQ ID NO: 3900 - DNA, 25 bp, Artificial Sequence
  Synthetic Oligonucleotide
cgcgctgtcgcttcagccgatgcga

SEQ ID NO: 3901 - DNA, 25 bp, Artificial Sequence
  Synthetic Oligonucleotide
ggctacggatgcacgcagacgacga

SEQ ID NO: 3902 - DNA, 25 bp, Artificial Sequence
  Synthetic Oligonucleotide
gttgagctgagatgcttccgtgaaa

SEQ ID NO: 3903 - DNA, 25 bp, Artificial Sequence
  Synthetic Oligonucleotide
gttatcaaataggttccgtgcctag

SEQ ID NO: 3904 - DNA, 25 bp, Artificial Sequence
  Synthetic Oligonucleotide
agtacgaatatcgatctaggtctca

SEQ ID NO: 3905 - DNA, 25 bp, Artificial Sequence
  Synthetic Oligonucleotide
taggaatgtaagttcatctactaca

SEQ ID NO: 3906 - DNA, 25 bp, Artificial Sequence
  Synthetic Oligonucleotide
tgtagtagatgaacttacattccta

SEQ ID NO: 3907 - DNA, 25 bp, Artificial Sequence
  Synthetic Oligonucleotide
ttacgtagagtaaaaaccttactga

SEQ ID NO: 3908 - DNA, 25 bp, Artificial Sequence
  Synthetic Oligonucleotide
ttacgactagtgattacccgtggga

SEQ ID NO: 3909 - DNA, 25 bp, Artificial Sequence
  Synthetic Oligonucleotide
tacacatttacaacgacgacctgga

SEQ ID NO: 3910 - DNA, 25 bp, Artificial Sequence
  Synthetic Oligonucleotide
agatcttcgtaatcgctacctgcta

SEQ ID NO: 3911 - DNA, 25 bp, Artificial Sequence
  Synthetic Oligonucleotide
agtacatacgaacatacgtcaacta

SEQ ID NO: 3912 - DNA, 25 bp, Artificial Sequence
  Synthetic Oligonucleotide
ggtaaacgtacagaacaatgcaata

SEQ ID NO: 3913 - DNA, 25 bp, Artificial Sequence
  Synthetic Oligonucleotide
gaggttaaccagcaacaatttccta

SEQ ID NO: 3914 - DNA, 25 bp, Artificial Sequence
  Synthetic Oligonucleotide
cggtcaaccaggacaaaactaccga

SEQ ID NO: 3915 - DNA, 25 bp, Artificial Sequence
  Synthetic Oligonucleotide
ggccacaccgcgacgaacttcaaga

SEQ ID NO: 3916 - DNA, 25 bp, Artificial Sequence
  Synthetic Oligonucleotide
gaatcgttccccacgttccgtcaaa

SEQ ID NO: 3917 - DNA, 25 bp, Artificial Sequence
  Synthetic Oligonucleotide
gaaccgttctccacgttccgtcaaa

SEQ ID NO: 3918 - DNA, 25 bp, Artificial Sequence
  Synthetic Oligonucleotide
agaagtggaccgtcttccgtcaggc

SEQ ID NO: 3919 - DNA, 25 bp, Artificial Sequence
  Synthetic Oligonucleotide
agcagccgctcgtccggcgtcagga

SEQ ID NO: 3920 - DNA, 25 bp, Artificial Sequence
  Synthetic Oligonucleotide
cgagcggtaccgtatcggaccttga

SEQ ID NO: 3921 - DNA, 25 bp, Artificial Sequence
  Synthetic Oligonucleotide
gtagggacacctacgtgtaacatga

SEQ ID NO: 3922 - DNA, 25 bp, Artificial Sequence
  Synthetic Oligonucleotide
ggtcgcagacctcttgtaccgatga

SEQ ID NO: 3923 - DNA, 25 bp, Artificial Sequence
  Synthetic Oligonucleotide
ctaccaacactccgtggtacaccaa

SEQ ID NO: 3924 - DNA, 25 bp, Artificial Sequence
  Synthetic Oligonucleotide
gcgcggacgacgcaaggaacctaca

SEQ ID NO: 3925 - DNA, 25 bp, Artificial Sequence
  Synthetic Oligonucleotide
gccgggaccggatcggctactccta

SEQ ID NO: 3926 - DNA, 25 bp, Artificial Sequence
  Synthetic Oligonucleotide
tcctcgaaggtatggctactcgcta

SEQ ID NO: 3927 - DNA, 25 bp, Artificial Sequence
  Synthetic Oligonucleotide
cttctgtcgacttgctaaaatcgca

SEQ ID NO: 3928 - DNA, 25 bp, Artificial Sequence
  Synthetic Oligonucleotide
gcttcttgctcttcttcacagctga

SEQ ID NO: 3929 - DNA, 25 bp, Artificial Sequence
  Synthetic Oligonucleotide
gcgtcttggtcttcttctcatctga

SEQ ID NO: 3930 - DNA, 25 bp, Artificial Sequence
  Synthetic Oligonucleotide
tgcattagttgccttcgactactga

SEQ ID NO: 3931 - DNA, 25 bp, Artificial Sequence
  Synthetic Oligonucleotide
agcaactgccgcagctcgagctgta

SEQ ID NO: 3932 - DNA, 25 bp, Artificial Sequence
  Synthetic Oligonucleotide
agcaactgccgcagctcgagctgta

SEQ ID NO: 3933 - DNA, 25 bp, Artificial Sequence
  Synthetic Oligonucleotide
aacattagtctcacgcacgcgggta

SEQ ID NO: 3934 - DNA, 25 bp, Artificial Sequence
  Synthetic Oligonucleotide
taaaaggttctcaactcgagcaata

SEQ ID NO: 3935 - DNA, 25 bp, Artificial Sequence
  Synthetic Oligonucleotide
aataaggttatctgtacaagcaaga

SEQ ID NO: 3936 - DNA, 25 bp, Artificial Sequence
  Synthetic Oligonucleotide
taagccggtttatccgaggtcaaga

SEQ ID NO: 3937 - DNA, 25 bp, Artificial Sequence
  Synthetic Oligonucleotide
aacgccctctcttcgcgaattaaga

SEQ ID NO: 3938 - DNA, 25 bp, Artificial Sequence
  Synthetic Oligonucleotide
gcaaccacttacatccgatctcaaa

SEQ ID NO: 3939 - DNA, 25 bp, Artificial Sequence
  Synthetic Oligonucleotide
ggtctacttcagacactccgacata

SEQ ID NO: 3940 - DNA, 25 bp, Artificial Sequence
  Synthetic Oligonucleotide
ggtcgcttctacactgcaacgacta

SEQ ID NO: 3941 - DNA, 25 bp, Artificial Sequence
  Synthetic Oligonucleotide
cagcagttctacgatggcaagtcct

SEQ ID NO: 3942 - DNA, 25 bp, Artificial Sequence
  Synthetic Oligonucleotide
ttacgactctcctggctaagaccca

SEQ ID NO: 3943 - DNA, 25 bp, Artificial Sequence
  Synthetic Oligonucleotide
cacgttctcgccactagagaaacga

SEQ ID NO: 3944 - DNA, 25 bp, Artificial Sequence
  Synthetic Oligonucleotide
aaaagtaggcctacaggaacgacga

SEQ ID NO: 3945 - DNA, 25 bp, Artificial Sequence
  Synthetic Oligonucleotide
gccgaaaacggtgctttaggcaaga

SEQ ID NO: 3946 - DNA, 25 bp, Artificial Sequence
  Synthetic Oligonucleotide
ccaagcggtagctctagccctcgat

SEQ ID NO: 3947 - DNA, 25 bp, Artificial Sequence
  Synthetic Oligonucleotide
gcaagaggtcgagttacgccttgta

SEQ ID NO: 3948 - DNA, 25 bp, Artificial Sequence
  Synthetic Oligonucleotide
gacgaaaggtcgtttctagtttgca

SEQ ID NO: 3949 - DNA, 25 bp, Artificial Sequence
  Synthetic Oligonucleotide
gacttacgattgggaagatctgcat

SEQ ID NO: 3950 - DNA, 25 bp, Artificial Sequence
  Synthetic Oligonucleotide
gctatctacctggtgaaagcagcat

SEQ ID NO: 3951 - DNA, 25 bp, Artificial Sequence
  Synthetic Oligonucleotide
gctactctcctgggagtaagcaaga

SEQ ID NO: 3952 - DNA, 25 bp, Artificial Sequence
  Synthetic Oligonucleotide
tgacttcttgacgagaaccgacaga

SEQ ID NO: 3953 - DNA, 25 bp, Artificial Sequence
  Synthetic Oligonucleotide
tttctcgttcacatgaaccgcacga

SEQ ID NO: 3954 - DNA, 25 bp, Artificial Sequence
  Synthetic Oligonucleotide
tgtaggctccacatgaacaggagta

SEQ ID NO: 3955 - DNA, 25 bp, Artificial Sequence
  Synthetic Oligonucleotide
tgactactcttacgaaacgagcgta

SEQ ID NO: 3956 - DNA, 25 bp, Artificial Sequence
  Synthetic Oligonucleotide
tagctactgtcgcggagtcggcgta

SEQ ID NO: 3957 - DNA, 25 bp, Artificial Sequence
  Synthetic Oligonucleotide
ccggcgtagcacatggccatgttca

SEQ ID NO: 3958 - DNA, 25 bp, Artificial Sequence
  Synthetic Oligonucleotide
acccagtagaaaagtgccaatcgga

SEQ ID NO: 3959 - DNA, 25 bp, Artificial Sequence
  Synthetic Oligonucleotide
cccatcacaagaaccacaaggtgta

SEQ ID NO: 3960 - DNA, 25 bp, Artificial Sequence
  Synthetic Oligonucleotide
tgccaactcggcacccgaaagtgta

SEQ ID NO: 3961 - DNA, 17 bp, Artificial Sequence
  Synthetic Oligonucleotide
cagttctacgatggcaa

SEQ ID NO: 3962 - DNA, 17 bp, Artificial Sequence
  Synthetic Oligonucleotide
ttgccatcgtagaactg

SEQ ID NO: 3963 - DNA, 17 bp, Artificial Sequence
  Synthetic Oligonucleotide
cagttctacgatggcaa

SEQ ID NO: 3964 - DNA, 17 bp, Artificial Sequence
  Synthetic Oligonucleotide
ttgccatcgtagaactg

SEQ ID NO: 3965 - DNA, 17 bp, Artificial Sequence
  Synthetic Oligonucleotide
agttctacgatggcaag

SEQ ID NO: 3966 - DNA, 17 bp, Artificial Sequence
  Synthetic Oligonucleotide
cttgccatcgtagaact

SEQ ID NO: 3967 - DNA, 17 bp, Artificial Sequence
  Synthetic Oligonucleotide
agttctacgatggcaag

SEQ ID NO: 3968 - DNA, 17 bp, Artificial Sequence
  Synthetic Oligonucleotide
cttgccatcgtagaact

SEQ ID NO: 3969 - DNA, 17 bp, Artificial Sequence
  Synthetic Oligonucleotide
gttctacgatggcaagt

SEQ ID NO: 3970 - DNA, 17 bp, Artificial Sequence
  Synthetic Oligonucleotide
acttgccatcgtagaac

SEQ ID NO: 3971 - DNA, 17 bp, Artificial Sequence
  Synthetic Oligonucleotide
gttctacgatggcaagt

SEQ ID NO: 3972 - DNA, 17 bp, Artificial Sequence
  Synthetic Oligonucleotide
acttgccatcgtagaac

SEQ ID NO: 3973 - DNA, 17 bp, Artificial Sequence
  Synthetic Oligonucleotide
ttctacgatggcaagtc

SEQ ID NO: 3974 - DNA, 17 bp, Artificial Sequence
  Synthetic Oligonucleotide
gacttgccatcgtagaa

SEQ ID NO: 3975 - DNA, 17 bp, Artificial Sequence
  Synthetic Oligonucleotide
ttctacgatggcaagtc

SEQ ID NO: 3976 - DNA, 17 bp, Artificial Sequence
  Synthetic Oligonucleotide
gacttgccatcgtagaa

SEQ ID NO: 3977 - DNA, 25 bp, Artificial Sequence
  Synthetic Oligonucleotide
ccgttgttgtgtagtagtcatccca

SEQ ID NO: 3978 - DNA, 25 bp, Artificial Sequence
  Synthetic Oligonucleotide
ggtttcagtgtcaacggtgttacaa

SEQ ID NO: 3979 - DNA, 25 bp, Artificial Sequence
  Synthetic Oligonucleotide
gttgcgattttagctagtcgacaga

SEQ ID NO: 3980 - DNA, 25 bp, Artificial Sequence
  Synthetic Oligonucleotide
tgaacgattcgaacgggaacgtcga

SEQ ID NO: 3981 - DNA, 25 bp, Artificial Sequence
  Synthetic Oligonucleotide
agcgtcagttcgaccgaatacggta

SEQ ID NO: 3982 - DNA, 25 bp, Artificial Sequence
  Synthetic Oligonucleotide
tagtagacattatcccgaaggtaga

SEQ ID NO: 3983 - DNA, 25 bp, Artificial Sequence
  Synthetic Oligonucleotide
acgaaactgtcttccgataggtaga

SEQ ID NO: 3984 - DNA, 25 bp, Artificial Sequence
  Synthetic Oligonucleotide
cctaagtgaattttctggtatgtca

SEQ ID NO: 3985 - DNA, 25 bp, Artificial Sequence
  Synthetic Oligonucleotide
catctacgaagtttttggttgtcta

SEQ ID NO: 3986 - DNA, 25 bp, Artificial Sequence
  Synthetic Oligonucleotide
actattcgacaattcttcttttcta

SEQ ID NO: 3987 - DNA, 25 bp, Artificial Sequence
  Synthetic Oligonucleotide
agaaatgacttacatgctttagtca

SEQ ID NO: 3988 - DNA, 25 bp, Artificial Sequence
  Synthetic Oligonucleotide
atcacgttatcgacgtttcgtctca

SEQ ID NO: 3989 - DNA, 25 bp, Artificial Sequence
  Synthetic Oligonucleotide
catccgtgtgcgactcggtcagtca

SEQ ID NO: 3990 - DNA, 25 bp, Artificial Sequence
  Synthetic Oligonucleotide
atacatggggcgaccgatcgctcga

SEQ ID NO: 3991 - DNA, 25 bp, Artificial Sequence
  Synthetic Oligonucleotide
aacatcaggcggttccacgccggta

SEQ ID NO: 3992 - DNA, 25 bp, Artificial Sequence
  Synthetic Oligonucleotide
aatttcggtccttacctaccgggtt

SEQ ID NO: 3993 - DNA, 25 bp, Artificial Sequence
  Synthetic Oligonucleotide
ctaaaggatcctgacctcaggagtc

SEQ ID NO: 3994 - DNA, 25 bp, Artificial Sequence
  Synthetic Oligonucleotide
ttggacggtcgtctcatcttgggtc

SEQ ID NO: 3995 - DNA, 25 bp, Artificial Sequence
  Synthetic Oligonucleotide
tgcgacgactagaccaccttaagga

SEQ ID NO: 3996 - DNA, 25 bp, Artificial Sequence
  Synthetic Oligonucleotide
agtcgaccaggtgtaactctggaga

SEQ ID NO: 3997 - DNA, 25 bp, Artificial Sequence
  Synthetic Oligonucleotide
agagtgccgcgaagaactactggga

SEQ ID NO: 3998 - DNA, 25 bp, Artificial Sequence
  Synthetic Oligonucleotide
gcttctcgcgtaagcctagggagta

SEQ ID NO: 3999 - DNA, 25 bp, Artificial Sequence
  Synthetic Oligonucleotide
tcgaccttgtcgagtcccaagagta

SEQ ID NO: 4000 - DNA, 25 bp, Artificial Sequence
  Synthetic Oligonucleotide
agtggcttctcttcccagaagagta

SEQ ID NO: 4001 - DNA, 25 bp, Artificial Sequence
  Synthetic Oligonucleotide
caggcttcttaatcttcgtaaagga

SEQ ID NO: 4002 - DNA, 25 bp, Artificial Sequence
  Synthetic Oligonucleotide
cggtctccctaatttccacacagta

SEQ ID NO: 4003 - DNA, 25 bp, Artificial Sequence
  Synthetic Oligonucleotide
cgccccggtaggactccatagagta

SEQ ID NO: 4004 - DNA, 25 bp, Artificial Sequence
  Synthetic Oligonucleotide
gcgggcagtgtggtgctctcaaaca

SEQ ID NO: 4005 - DNA, 25 bp, Artificial Sequence
  Synthetic Oligonucleotide
cggacgaagtggtggaagaactaca

SEQ ID NO: 4006 - DNA, 25 bp, Artificial Sequence
  Synthetic Oligonucleotide
ttgtcaaaggtttcggatgatacca

SEQ ID NO: 4007 - DNA, 25 bp, Artificial Sequence
  Synthetic Oligonucleotide
tcgtagaaaatttagcgaaacttca

SEQ ID NO: 4008 - DNA, 25 bp, Artificial Sequence
  Synthetic Oligonucleotide
tcaagttcgttgtagcacaagagca

SEQ ID NO: 4009 - DNA, 25 bp, Artificial Sequence
  Synthetic Oligonucleotide
tcaggagcttggaacaccgaggtga

SEQ ID NO: 4010 - DNA, 25 bp, Artificial Sequence
  Synthetic Oligonucleotide
caaaagattggaacatcggagtcga

SEQ ID NO: 4011 - DNA, 25 bp, Artificial Sequence
  Synthetic Oligonucleotide
aaacaagtcacattaatcggtagca

SEQ ID NO: 4012 - DNA, 25 bp, Artificial Sequence
  Synthetic Oligonucleotide
ccaagaggtccagtaagctataaac

SEQ ID NO: 4013 - DNA, 25 bp, Artificial Sequence
  Synthetic Oligonucleotide
cggagaggtccaacgagtgcatgaa

SEQ ID NO: 4014 - DNA, 25 bp, Artificial Sequence
  Synthetic Oligonucleotide
agcagggtcaaccactgctacggca

SEQ ID NO: 4015 - DNA, 25 bp, Artificial Sequence
  Synthetic Oligonucleotide
agaagaggtacagcagggtcaacca

SEQ ID NO: 4016 - DNA, 25 bp, Artificial Sequence
  Synthetic Oligonucleotide
cgtgaaagagacaactggaaaccca

SEQ ID NO: 4017 - DNA, 25 bp, Artificial Sequence
  Synthetic Oligonucleotide
gacaacgacatcggtttaagcaaca

SEQ ID NO: 4018 - DNA, 25 bp, Artificial Sequence
  Synthetic Oligonucleotide
gagaagtgagacctttcatcaacga

SEQ ID NO: 4019 - DNA, 25 bp, Artificial Sequence
  Synthetic Oligonucleotide
gaagtagagccgctgcacgagatga

SEQ ID NO: 4020 - DNA, 25 bp, Artificial Sequence
  Synthetic Oligonucleotide
gagacatctagtctgaccgaactga

SEQ ID NO: 4021 - DNA, 25 bp, Artificial Sequence
  Synthetic Oligonucleotide
ggacagtcgctacggacccatgtac

SEQ ID NO: 4022 - DNA, 25 bp, Artificial Sequence
  Synthetic Oligonucleotide
ggaccgtcgctagcgataaaaggta

SEQ ID NO: 4023 - DNA, 25 bp, Artificial Sequence
  Synthetic Oligonucleotide
acaggcgcgtccgcataaatggcgt

SEQ ID NO: 4024 - DNA, 25 bp, Artificial Sequence
  Synthetic Oligonucleotide
aacaggcagtccttcaagcatcctg

SEQ ID NO: 4025 - DNA, 25 bp, Artificial Sequence
  Synthetic Oligonucleotide
caagagcagccgtttggacagcggc

SEQ ID NO: 4026 - DNA, 25 bp, Artificial Sequence
  Synthetic Oligonucleotide
tcttgaaacggctttggatgcacga

SEQ ID NO: 4027 - DNA, 25 bp, Artificial Sequence
  Synthetic Oligonucleotide
tcggtaacagcgtgtgttcccgcca

SEQ ID NO: 4028 - DNA, 25 bp, Artificial Sequence
  Synthetic Oligonucleotide
aggaaatcatacctgtctccctcga

SEQ ID NO: 4029 - DNA, 25 bp, Artificial Sequence
  Synthetic Oligonucleotide
aggaagtcagaagactaccgcctga

SEQ ID NO: 4030 - DNA, 25 bp, Artificial Sequence
  Synthetic Oligonucleotide
gcggtgtcgaaaggtctccccggta

SEQ ID NO: 4031 - DNA, 25 bp, Artificial Sequence
  Synthetic Oligonucleotide
ccggtacgaagagacggaccccgta

SEQ ID NO: 4032 - DNA, 25 bp, Artificial Sequence
  Synthetic Oligonucleotide
ctctagacgaagaatcgaatccgga

SEQ ID NO: 4033 - DNA, 25 bp, Artificial Sequence
  Synthetic Oligonucleotide
cagttaggaatgatacagacctgga

SEQ ID NO: 4034 - DNA, 25 bp, Artificial Sequence
  Synthetic Oligonucleotide
ggtatagtagggtcaacgactgcta

SEQ ID NO: 4035 - DNA, 25 bp, Artificial Sequence
  Synthetic Oligonucleotide
ggtatagtagggtcaaccactgcta

SEQ ID NO: 4036 - DNA, 25 bp, Artificial Sequence
  Synthetic Oligonucleotide
gtccagtagggttatattcgctgca

SEQ ID NO: 4037 - DNA, 25 bp, Artificial Sequence
  Synthetic Oligonucleotide
ttcaactggtcgactcgttgctgca

SEQ ID NO: 4038 - DNA, 25 bp, Artificial Sequence
  Synthetic Oligonucleotide
ggcaagtggtagagtcttcctatca

SEQ ID NO: 4039 - DNA, 25 bp, Artificial Sequence
  Synthetic Oligonucleotide
ggtctgaacgggaggttacctagga

SEQ ID NO: 4040 - DNA, 25 bp, Artificial Sequence
  Synthetic Oligonucleotide
ggtctgaacgggaggttacctagga

SEQ ID NO: 4041 - DNA, 25 bp, Artificial Sequence
  Synthetic Oligonucleotide
ggtctccccggtaggtgtcagaaga

SEQ ID NO: 4042 - DNA, 25 bp, Artificial Sequence
  Synthetic Oligonucleotide
accttccgcggctgtaccagaagta

SEQ ID NO: 4043 - DNA, 25 bp, Artificial Sequence
  Synthetic Oligonucleotide
ctcggcctcggctgaacgaggtaga

SEQ ID NO: 4044 - DNA, 25 bp, Artificial Sequence
  Synthetic Oligonucleotide
ctcgaacttcgccggcaccggtaga

SEQ ID NO: 4045 - DNA, 25 bp, Artificial Sequence
  Synthetic Oligonucleotide
tgctcgaacttcgccggcaccggta

SEQ ID NO: 4046 - DNA, 25 bp, Artificial Sequence
  Synthetic Oligonucleotide
tgtctcgacatgtcccggtccagga

SEQ ID NO: 4047 - DNA, 25 bp, Artificial Sequence
  Synthetic Oligonucleotide
cgttctaagacttgctgttccaaga

SEQ ID NO: 4048 - DNA, 25 bp, Artificial Sequence
  Synthetic Oligonucleotide
actggtcagatcttcgttgttcaaa

SEQ ID NO: 4049 - DNA, 25 bp, Artificial Sequence
  Synthetic Oligonucleotide
taggccgactacttttggtaaatag

SEQ ID NO: 4050 - DNA, 25 bp, Artificial Sequence
  Synthetic Oligonucleotide
aggccgcgagtaatggttactaaga

SEQ ID NO: 4051 - DNA, 25 bp, Artificial Sequence
  Synthetic Oligonucleotide
tcattggtgcaagtgagttctagaa

SEQ ID NO: 4052 - DNA, 25 bp, Artificial Sequence
  Synthetic Oligonucleotide
tacactttcgggtgccgagttggca

SEQ ID NO: 4053 - DNA, 25 bp, Artificial Sequence
  Synthetic Oligonucleotide
ttcggtgtccttagccgtgtcccca

SEQ ID NO: 4054 - DNA, 25 bp, Artificial Sequence
  Synthetic Oligonucleotide
gtagtagcaatagccgttcgccgca

SEQ ID NO: 4055 - DNA, 25 bp, Artificial Sequence
  Synthetic Oligonucleotide
gaggacccgaccttccgtcacgtga

SEQ ID NO: 4056 - DNA, 25 bp, Artificial Sequence
  Synthetic Oligonucleotide
caggtctgcgaccaatcgtgctcga

SEQ ID NO: 4057 - DNA, 25 bp, Artificial Sequence
  Synthetic Oligonucleotide
agtccgacgatttctactgcgtcga

SEQ ID NO: 4058 - DNA, 25 bp, Artificial Sequence
  Synthetic Oligonucleotide
taaagtggagactgttaacttatga

SEQ ID NO: 4059 - DNA, 25 bp, Artificial Sequence
  Synthetic Oligonucleotide
ttacagtgaggactcaaaggtacga

SEQ ID NO: 4060 - DNA, 25 bp, Artificial Sequence
  Synthetic Oligonucleotide
gcgccattaggacccaagatgagac

SEQ ID NO: 4061 - DNA, 25 bp, Artificial Sequence
  Synthetic Oligonucleotide
ggccgtttagcaactgaaactagaa

SEQ ID NO: 4062 - DNA, 25 bp, Artificial Sequence
  Synthetic Oligonucleotide
accaacccatcaatgctgctagaag

SEQ ID NO: 4063 - DNA, 25 bp, Artificial Sequence
  Synthetic Oligonucleotide
accaacccatcaatgccgctagaag

SEQ ID NO: 4064 - DNA, 16 bp, Artificial Sequence
  Synthetic Oligonucleotide
cttgccatcgtagaac

SEQ ID NO: 4065 - DNA, 25 bp, Artificial Sequence
  Synthetic Oligonucleotide
ttacgactctccaggctaagaccca

SEQ ID NO: 4066 - DNA, 25 bp, Artificial Sequence
  Synthetic Oligonucleotide
cacgttctcgcctctagagaaacga

SEQ ID NO: 4067 - DNA, 25 bp, Artificial Sequence
  Synthetic Oligonucleotide
aaaagtaggccttcaggaacgacga

SEQ ID NO: 4068 - DNA, 25 bp, Artificial Sequence
  Synthetic Oligonucleotide
gccgaaaacggtcctttaggcaaga

SEQ ID NO: 4069 - DNA, 25 bp, Artificial Sequence
  Synthetic Oligonucleotide
ccaagcggtagcactagccctcgat

SEQ ID NO: 4070 - DNA, 25 bp, Artificial Sequence
  Synthetic Oligonucleotide
gcaagaggtcgacttacgccttgta

SEQ ID NO: 4071 - DNA, 25 bp, Artificial Sequence
  Synthetic Oligonucleotide
gacgaaaggtcgattctagtttgca

SEQ ID NO: 4072 - DNA, 25 bp, Artificial Sequence
  Synthetic Oligonucleotide
gacttacgattgcgaagatctgcat

SEQ ID NO: 4073 - DNA, 25 bp, Artificial Sequence
  Synthetic Oligonucleotide
gctatctacctgctgaaagcagcat

SEQ ID NO: 4074 - DNA, 25 bp, Artificial Sequence
  Synthetic Oligonucleotide
gctactctcctgcgagtaagcaaga

SEQ ID NO: 4075 - DNA, 25 bp, Artificial Sequence
  Synthetic Oligonucleotide
tgacttcttgaccagaaccgacaga

SEQ ID NO: 4076 - DNA, 25 bp, Artificial Sequence
  Synthetic Oligonucleotide
tttctcgttcacttgaaccgcacga

SEQ ID NO: 4077 - DNA, 25 bp, Artificial Sequence
  Synthetic Oligonucleotide
tgtaggctccacttgaacaggagta

SEQ ID NO: 4078 - DNA, 25 bp, Artificial Sequence
  Synthetic Oligonucleotide
tgactactcttaggaaacgagcgta

SEQ ID NO: 4079 - DNA, 25 bp, Artificial Sequence
  Synthetic Oligonucleotide
tagctactgtcggggagtcggcgta

SEQ ID NO: 4080 - DNA, 25 bp, Artificial Sequence
  Synthetic Oligonucleotide
ccggcgtagcacttggccatgttca

SEQ ID NO: 4081 - DNA, 25 bp, Artificial Sequence
  Synthetic Oligonucleotide
acccagtagaaatgtgccaatcgga

SEQ ID NO: 4082 - DNA, 25 bp, Artificial Sequence
  Synthetic Oligonucleotide
cccatcacaagatccacaaggtgta

SEQ ID NO: 4083 - DNA, 25 bp, Artificial Sequence
  Synthetic Oligonucleotide
tgccaactcggctcccgaaagtgta

SEQ ID NO: 4084 - DNA, 17 bp, Artificial Sequence
  Synthetic Oligonucleotide
ttgccatcgtagaactg

SEQ ID NO: 4085 - DNA, 17 bp, Artificial Sequence
  Synthetic Oligonucleotide
cagttctacgatggcaa

SEQ ID NO: 4086 - DNA, 17 bp, Artificial Sequence
  Synthetic Oligonucleotide
ttgccatcgtagaactg

SEQ ID NO: 4087 - DNA, 17 bp, Artificial Sequence
  Synthetic Oligonucleotide
cagttctacgatggcaa

SEQ ID NO: 4088 - DNA, 17 bp, Artificial Sequence
  Synthetic Oligonucleotide
cttgccatcgtagaact

SEQ ID NO: 4089 - DNA, 17 bp, Artificial Sequence
  Synthetic Oligonucleotide
agttctacgatggcaag

SEQ ID NO: 4090 - DNA, 17 bp, Artificial Sequence
  Synthetic Oligonucleotide
cttgccatcgtagaact

SEQ ID NO: 4091 - DNA, 17 bp, Artificial Sequence
  Synthetic Oligonucleotide
agttctacgatggcaag

SEQ ID NO: 4092 - DNA, 17 bp, Artificial Sequence
  Synthetic Oligonucleotide
acttgccatcgtagaac

SEQ ID NO: 4093 - DNA, 17 bp, Artificial Sequence
  Synthetic Oligonucleotide
gttctacgatggcaagt

SEQ ID NO: 4094 - DNA, 17 bp, Artificial Sequence
  Synthetic Oligonucleotide
acttgccatcgtagaac

SEQ ID NO: 4095 - DNA, 17 bp, Artificial Sequence
  Synthetic Oligonucleotide
gttctacgatggcaagt

SEQ ID NO: 4096 - DNA, 17 bp, Artificial Sequence
  Synthetic Oligonucleotide
gacttgccatcgtagaa

SEQ ID NO: 4097 - DNA, 17 bp, Artificial Sequence
  Synthetic Oligonucleotide
ttctacgatggcaagtc

SEQ ID NO: 4098 - DNA, 17 bp, Artificial Sequence
  Synthetic Oligonucleotide
gacttgccatcgtagaa

SEQ ID NO: 4099 - DNA, 17 bp, Artificial Sequence
  Synthetic Oligonucleotide
ttctacgatggcaagtc

SEQ ID NO: 4100 - DNA, 25 bp, Artificial Sequence
  Synthetic Oligonucleotide
ccgttgttgtgttgtagtcatccca

SEQ ID NO: 4101 - DNA, 25 bp, Artificial Sequence
  Synthetic Oligonucleotide
ggtttcagtgtctacggtgttacaa

SEQ ID NO: 4102 - DNA, 25 bp, Artificial Sequence
  Synthetic Oligonucleotide
gttgcgattttacctagtcgacaga

SEQ ID NO: 4103 - DNA, 25 bp, Artificial Sequence
  Synthetic Oligonucleotide
tgaacgattcgatcgggaacgtcga

SEQ ID NO: 4104 - DNA, 25 bp, Artificial Sequence
  Synthetic Oligonucleotide
agcgtcagttcgtccgaatacggta

SEQ ID NO: 4105 - DNA, 25 bp, Artificial Sequence
  Synthetic Oligonucleotide
tagtagacattaacccgaaggtaga

SEQ ID NO: 4106 - DNA, 25 bp, Artificial Sequence
  Synthetic Oligonucleotide
acgaaactgtctaccgataggtaga

SEQ ID NO: 4107 - DNA, 25 bp, Artificial Sequence
  Synthetic Oligonucleotide
cctaagtgaattatctggtatgtca

SEQ ID NO: 4108 - DNA, 25 bp, Artificial Sequence
  Synthetic Oligonucleotide
catctacgaagtatttggttgtcta

SEQ ID NO: 4109 - DNA, 25 bp, Artificial Sequence
  Synthetic Oligonucleotide
actattcgacaaatcttcttttcta

SEQ ID NO: 4110 - DNA, 25 bp, Artificial Sequence
  Synthetic Oligonucleotide
agaaatgacttagatgctttagtca

SEQ ID NO: 4111 - DNA, 25 bp, Artificial Sequence
  Synthetic Oligonucleotide
atcacgttatcgtcgtttcgtctca

SEQ ID NO: 4112 - DNA, 25 bp, Artificial Sequence
  Synthetic Oligonucleotide
catccgtgtgcgtctcggtcagtca

SEQ ID NO: 4113 - DNA, 25 bp, Artificial Sequence
  Synthetic Oligonucleotide
atacatggggcgtccgatcgctcga

SEQ ID NO: 4114 - DNA, 25 bp, Artificial Sequence
  Synthetic Oligonucleotide
aacatcaggcggatccacgccggta

SEQ ID NO: 4115 - DNA, 25 bp, Artificial Sequence
  Synthetic Oligonucleotide
aatttcggtcctaacctaccgggtt

SEQ ID NO: 4116 - DNA, 25 bp, Artificial Sequence
  Synthetic Oligonucleotide
ctaaaggatcctcacctcaggagtc

SEQ ID NO: 4117 - DNA, 25 bp, Artificial Sequence
  Synthetic Oligonucleotide
ttggacggtcgtgtcatcttgggtc

SEQ ID NO: 4118 - DNA, 25 bp, Artificial Sequence
  Synthetic Oligonucleotide
tgcgacgactagtccaccttaagga

SEQ ID NO: 4119 - DNA, 25 bp, Artificial Sequence
  Synthetic Oligonucleotide
agtcgaccaggtctaactctggaga

SEQ ID NO: 4120 - DNA, 25 bp, Artificial Sequence
  Synthetic Oligonucleotide
agagtgccgcgatgaactactggga

SEQ ID NO: 4121 - DNA, 25 bp, Artificial Sequence
  Synthetic Oligonucleotide
gcttctcgcgtatgcctagggagta

SEQ ID NO: 4122 - DNA, 25 bp, Artificial Sequence
  Synthetic Oligonucleotide
tcgaccttgtcgtgtcccaagagta

SEQ ID NO: 4123 - DNA, 25 bp, Artificial Sequence
  Synthetic Oligonucleotide
agtggcttctctacccagaagagta

SEQ ID NO: 4124 - DNA, 25 bp, Artificial Sequence
  Synthetic Oligonucleotide
caggcttcttaaacttcgtaaagga

SEQ ID NO: 4125 - DNA, 25 bp, Artificial Sequence
  Synthetic Oligonucleotide
cggtctccctaaattccacacagta

SEQ ID NO: 4126 - DNA, 25 bp, Artificial Sequence
  Synthetic Oligonucleotide
cgccccggtaggtctccatagagta

SEQ ID NO: 4127 - DNA, 25 bp, Artificial Sequence
  Synthetic Oligonucleotide
gcgggcagtgtgctgctctcaaaca

SEQ ID NO: 4128 - DNA, 25 bp, Artificial Sequence
  Synthetic Oligonucleotide
cggacgaagtggaggaagaactaca

SEQ ID NO: 4129 - DNA, 25 bp, Artificial Sequence
  Synthetic Oligonucleotide
ttgtcaaaggttacggatgatacca

SEQ ID NO: 4130 - DNA, 25 bp, Artificial Sequence
  Synthetic Oligonucleotide
tcgtagaaaattaagcgaaacttca

SEQ ID NO: 4131 - DNA, 25 bp, Artificial Sequence
  Synthetic Oligonucleotide
tcaagttcgttgaagcacaagagca

SEQ ID NO: 4132 - DNA, 25 bp, Artificial Sequence
  Synthetic Oligonucleotide
tcaggagcttggtacaccgaggtga

SEQ ID NO: 4133 - DNA, 25 bp, Artificial Sequence
  Synthetic Oligonucleotide
caaaagattggatcatcggagtcga

SEQ ID NO: 4134 - DNA, 25 bp, Artificial Sequence
  Synthetic Oligonucleotide
aaacaagtcacaataatcggtagca

SEQ ID NO: 4135 - DNA, 25 bp, Artificial Sequence
  Synthetic Oligonucleotide
ccaagaggtccactaagctataaac

SEQ ID NO: 4136 - DNA, 25 bp, Artificial Sequence
  Synthetic Oligonucleotide
cggagaggtccatcgagtgcatgaa

SEQ ID NO: 4137 - DNA, 25 bp, Artificial Sequence
  Synthetic Oligonucleotide
agcagggtcaacgactgctacggca

SEQ ID NO: 4138 - DNA, 25 bp, Artificial Sequence
  Synthetic Oligonucleotide
agaagaggtacaccagggtcaacca

SEQ ID NO: 4139 - DNA, 25 bp, Artificial Sequence
  Synthetic Oligonucleotide
cgtgaaagagactactggaaaccca

SEQ ID NO: 4140 - DNA, 25 bp, Artificial Sequence
  Synthetic Oligonucleotide
gacaacgacatccgtttaagcaaca

SEQ ID NO: 4141 - DNA, 25 bp, Artificial Sequence
  Synthetic Oligonucleotide
gagaagtgagacgtttcatcaacga

SEQ ID NO: 4142 - DNA, 25 bp, Artificial Sequence
  Synthetic Oligonucleotide
gaagtagagccggtgcacgagatga

SEQ ID NO: 4143 - DNA, 25 bp, Artificial Sequence
  Synthetic Oligonucleotide
gagacatctagtgtgaccgaactga

SEQ ID NO: 4144 - DNA, 25 bp, Artificial Sequence
  Synthetic Oligonucleotide
ggacagtcgctagggacccatgtac

SEQ ID NO: 4145 - DNA, 25 bp, Artificial Sequence
  Synthetic Oligonucleotide
ggaccgtcgctaccgataaaaggta

SEQ ID NO: 4146 - DNA, 25 bp, Artificial Sequence
  Synthetic Oligonucleotide
acaggcgcgtccccataaatggcgt

SEQ ID NO: 4147 - DNA, 25 bp, Artificial Sequence
  Synthetic Oligonucleotide
aacaggcagtccatcaagcatcctg

SEQ ID NO: 4148 - DNA, 25 bp, Artificial Sequence
  Synthetic Oligonucleotide
caagagcagccgattggacagcggc

SEQ ID NO: 4149 - DNA, 25 bp, Artificial Sequence
  Synthetic Oligonucleotide
tcttgaaacggcattggatgcacga

SEQ ID NO: 4150 - DNA, 25 bp, Artificial Sequence
  Synthetic Oligonucleotide
tcggtaacagcgagtgttcccgcca

SEQ ID NO: 4151 - DNA, 25 bp, Artificial Sequence
  Synthetic Oligonucleotide
aggaaatcatacgtgtctccctcga

SEQ ID NO: 4152 - DNA, 25 bp, Artificial Sequence
  Synthetic Oligonucleotide
aggaagtcagaacactaccgcctga

SEQ ID NO: 4153 - DNA, 25 bp, Artificial Sequence
  Synthetic Oligonucleotide
gcggtgtcgaaacgtctccccggta

SEQ ID NO: 4154 - DNA, 25 bp, Artificial Sequence
  Synthetic Oligonucleotide
ccggtacgaagacacggaccccgta

SEQ ID NO: 4155 - DNA, 25 bp, Artificial Sequence
  Synthetic Oligonucleotide
ctctagacgaagtatcgaatccgga

SEQ ID NO: 4156 - DNA, 25 bp, Artificial Sequence
  Synthetic Oligonucleotide
cagttaggaatgttacagacctgga

SEQ ID NO: 4157 - DNA, 25 bp, Artificial Sequence
  Synthetic Oligonucleotide
ggtatagtagggacaacgactgcta

SEQ ID NO: 4158 - DNA, 25 bp, Artificial Sequence
  Synthetic Oligonucleotide
ggtatagtagggacaaccactgcta

SEQ ID NO: 4159 - DNA, 25 bp, Artificial Sequence
  Synthetic Oligonucleotide
gtccagtagggtaatattcgctgca

SEQ ID NO: 4160 - DNA, 25 bp, Artificial Sequence
  Synthetic Oligonucleotide
ttcaactggtcgtctcgttgctgca

SEQ ID NO: 4161 - DNA, 25 bp, Artificial Sequence
  Synthetic Oligonucleotide
ggcaagtggtagtgtcttcctatca

SEQ ID NO: 4162 - DNA, 25 bp, Artificial Sequence
  Synthetic Oligonucleotide
ggtctgaacgggtggttacctagga

SEQ ID NO: 4163 - DNA, 25 bp, Artificial Sequence
  Synthetic Oligonucleotide
ggtctgaacgggtggttacctagga

SEQ ID NO: 4164 - DNA, 25 bp, Artificial Sequence
  Synthetic Oligonucleotide
ggtctccccggttggtgtcagaaga

SEQ ID NO: 4165 - DNA, 25 bp, Artificial Sequence
  Synthetic Oligonucleotide
accttccgcggcagtaccagaagta

SEQ ID NO: 4166 - DNA, 25 bp, Artificial Sequence
  Synthetic Oligonucleotide
ctcggcctcggcagaacgaggtaga

SEQ ID NO: 4167 - DNA, 25 bp, Artificial Sequence
  Synthetic Oligonucleotide
ctcgaacttcgcgggcaccggtaga

SEQ ID NO: 4168 - DNA, 25 bp, Artificial Sequence
  Synthetic Oligonucleotide
tgctcgaacttccccggcaccggta

SEQ ID NO: 4169 - DNA, 25 bp, Artificial Sequence
  Synthetic Oligonucleotide
tgtctcgacatgacccggtccagga

SEQ ID NO: 4170 - DNA, 25 bp, Artificial Sequence
  Synthetic Oligonucleotide
cgttctaagactagctgttccaaga

SEQ ID NO: 4171 - DNA, 25 bp, Artificial Sequence
  Synthetic Oligonucleotide
actggtcagatcatcgttgttcaaa

SEQ ID NO: 4172 - DNA, 25 bp, Artificial Sequence
  Synthetic Oligonucleotide
taggccgactacatttggtaaatag

SEQ ID NO: 4173 - DNA, 25 bp, Artificial Sequence
  Synthetic Oligonucleotide
aggccgcgagtattggttactaaga

SEQ ID NO: 4174 - DNA, 25 bp, Artificial Sequence
  Synthetic Oligonucleotide
tcattggtgcaactgagttctagaa

SEQ ID NO: 4175 - DNA, 25 bp, Artificial Sequence
  Synthetic Oligonucleotide
tacactttcgggagccgagttggca

SEQ ID NO: 4176 - DNA, 25 bp, Artificial Sequence
  Synthetic Oligonucleotide
ttcggtgtcctttgccgtgtcccca

SEQ ID NO: 4177 - DNA, 25 bp, Artificial Sequence
  Synthetic Oligonucleotide
gtagtagcaatacccgttcgccgca

SEQ ID NO: 4178 - DNA, 25 bp, Artificial Sequence
  Synthetic Oligonucleotide
gaggacccgaccatccgtcacgtga

SEQ ID NO: 4179 - DNA, 25 bp, Artificial Sequence
  Synthetic Oligonucleotide
caggtctgcgacgaatcgtgctcga

SEQ ID NO: 4180 - DNA, 25 bp, Artificial Sequence
  Synthetic Oligonucleotide
agtccgacgattactactgcgtcga

SEQ ID NO: 4181 - DNA, 25 bp, Artificial Sequence
  Synthetic Oligonucleotide
taaagtggagacagttaacttatga

SEQ ID NO: 4182 - DNA, 25 bp, Artificial Sequence
  Synthetic Oligonucleotide
ttacagtgaggagtcaaaggtacga

SEQ ID NO: 4183 - DNA, 25 bp, Artificial Sequence
  Synthetic Oligonucleotide
gcgccattaggagccaagatgagac

SEQ ID NO: 4184 - DNA, 25 bp, Artificial Sequence
  Synthetic Oligonucleotide
ggccgtttagcatctgaaactagaa

SEQ ID NO: 4185 - DNA, 25 bp, Artificial Sequence
  Synthetic Oligonucleotide
accaacccatcattgctgctagaag

SEQ ID NO: 4186 - DNA, 25 bp, Artificial Sequence
  Synthetic Oligonucleotide
accaacccatcattgccgctagaag

SEQ ID NO: 4187 - DNA, 16 bp, Artificial Sequence
  Synthetic Oligonucleotide
cttgccatcgtagaac

SEQ ID NO: 4188 - DNA, 18 bp, Artificial Sequence
  Synthetic Oligonucleotide
acttgccatcgtagaact

SEQ ID NO: 4189 - DNA, 25 bp, Artificial Sequence
  Synthetic Oligonucleotide
aagtggtgtgccataacatgtgcca

SEQ ID NO: 4190 - DNA, 25 bp, Artificial Sequence
  Synthetic Oligonucleotide
tttggtgttccatgacttagttgca

SEQ ID NO: 4191 - DNA, 25 bp, Artificial Sequence
  Synthetic Oligonucleotide
ttgccgtacctcggtatttaaagca

SEQ ID NO: 4192 - DNA, 25 bp, Artificial Sequence
  Synthetic Oligonucleotide
tcccgctacatcctttcgaagagga

SEQ ID NO: 4193 - DNA, 25 bp, Artificial Sequence
  Synthetic Oligonucleotide
tcccggtgcatcgtatcgaagagga

SEQ ID NO: 4194 - DNA, 25 bp, Artificial Sequence
  Synthetic Oligonucleotide
acgaccaggccaccttacgggagga

SEQ ID NO: 4195 - DNA, 25 bp, Artificial Sequence
  Synthetic Oligonucleotide
acgaaaggccgcttctattcggaga

SEQ ID NO: 4196 - DNA, 25 bp, Artificial Sequence
  Synthetic Oligonucleotide
cgatgatctaccaagctaatcagaa

SEQ ID NO: 4197 - DNA, 25 bp, Artificial Sequence
  Synthetic Oligonucleotide
gaaggtcacatcatctaataacgaa

SEQ ID NO: 4198 - DNA, 25 bp, Artificial Sequence
  Synthetic Oligonucleotide
aacttgacgtgtgcttaaagacgaa

SEQ ID NO: 4199 - DNA, 25 bp, Artificial Sequence
  Synthetic Oligonucleotide
cttgatgctgccatagactagcaga

SEQ ID NO: 4200 - DNA, 25 bp, Artificial Sequence
  Synthetic Oligonucleotide
cttgatcccgccatagactagcgga

SEQ ID NO: 4201 - DNA, 25 bp, Artificial Sequence
  Synthetic Oligonucleotide
tgtgagcctaccgttagagtggaga

SEQ ID NO: 4202 - DNA, 25 bp, Artificial Sequence
  Synthetic Oligonucleotide
cacgtcctacgtaacgactgttaga

SEQ ID NO: 4203 - DNA, 25 bp, Artificial Sequence
  Synthetic Oligonucleotide
ttagtcgacgtcaagtacttgcgac

SEQ ID NO: 4204 - DNA, 25 bp, Artificial Sequence
  Synthetic Oligonucleotide
cggttgagtcgtgaagactttcgac

SEQ ID NO: 4205 - DNA, 25 bp, Artificial Sequence
  Synthetic Oligonucleotide
cgagtatgaggtcgaactgcgcgta

SEQ ID NO: 4206 - DNA, 25 bp, Artificial Sequence
  Synthetic Oligonucleotide
gtatgacagtgtaacaacgttcgta

SEQ ID NO: 4207 - DNA, 25 bp, Artificial Sequence
  Synthetic Oligonucleotide
tcttacgactagatcgaactaggta

SEQ ID NO: 4208 - DNA, 17 bp, Artificial Sequence
  Synthetic Oligonucleotide
cagttctacgatggcaa

SEQ ID NO: 4209 - DNA, 17 bp, Artificial Sequence
  Synthetic Oligonucleotide
ttgccatcgtagaactg

SEQ ID NO: 4210 - DNA, 17 bp, Artificial Sequence
  Synthetic Oligonucleotide
cagttctacgatggcaa

SEQ ID NO: 4211 - DNA, 17 bp, Artificial Sequence
  Synthetic Oligonucleotide
ttgccatcgtagaactg

SEQ ID NO: 4212 - DNA, 17 bp, Artificial Sequence
  Synthetic Oligonucleotide
agttctacgatggcaag

SEQ ID NO: 4213 - DNA, 17 bp, Artificial Sequence
  Synthetic Oligonucleotide
cttgccatcgtagaact

SEQ ID NO: 4214 - DNA, 17 bp, Artificial Sequence
  Synthetic Oligonucleotide
agttctacgatggcaag

SEQ ID NO: 4215 - DNA, 17 bp, Artificial Sequence
  Synthetic Oligonucleotide
cttgccatcgtagaact

SEQ ID NO: 4216 - DNA, 17 bp, Artificial Sequence
  Synthetic Oligonucleotide
gttctacgatggcaagt

SEQ ID NO: 4217 - DNA, 17 bp, Artificial Sequence
  Synthetic Oligonucleotide
acttgccatcgtagaac

SEQ ID NO: 4218 - DNA, 17 bp, Artificial Sequence
  Synthetic Oligonucleotide
gttctacgatggcaagt

SEQ ID NO: 4219 - DNA, 17 bp, Artificial Sequence
  Synthetic Oligonucleotide
acttgccatcgtagaac

SEQ ID NO: 4220 - DNA, 17 bp, Artificial Sequence
  Synthetic Oligonucleotide
ttctacgatggcaagtc

SEQ ID NO: 4221 - DNA, 17 bp, Artificial Sequence
  Synthetic Oligonucleotide
gacttgccatcgtagaa

SEQ ID NO: 4222 - DNA, 17 bp, Artificial Sequence
  Synthetic Oligonucleotide
ttctacgatggcaagtc

SEQ ID NO: 4223 - DNA, 17 bp, Artificial Sequence
  Synthetic Oligonucleotide
gacttgccatcgtagaa

SEQ ID NO: 4224 - DNA, 25 bp, Artificial Sequence
  Synthetic Oligonucleotide
atcggttgctgtgcacgggaagccc

SEQ ID NO: 4225 - DNA, 25 bp, Artificial Sequence
  Synthetic Oligonucleotide
tcgttgctgcacttgcgttacgcaa

SEQ ID NO: 4226 - DNA, 25 bp, Artificial Sequence
  Synthetic Oligonucleotide
tcgttgactttgttgtcttcgaaga

SEQ ID NO: 4227 - DNA, 25 bp, Artificial Sequence
  Synthetic Oligonucleotide
cgttcaagttcgttgtagcacaaga

SEQ ID NO: 4228 - DNA, 25 bp, Artificial Sequence
  Synthetic Oligonucleotide
cgatccacgttctcgccactagaga

SEQ ID NO: 4229 - DNA, 25 bp, Artificial Sequence
  Synthetic Oligonucleotide
gcgagcaacggctaccactactgga

SEQ ID NO: 4230 - DNA, 25 bp, Artificial Sequence
  Synthetic Oligonucleotide
gcgagcaacggctaccactactgga

SEQ ID NO: 4231 - DNA, 25 bp, Artificial Sequence
  Synthetic Oligonucleotide
ccggaagagctaccaccacttctga

SEQ ID NO: 4232 - DNA, 25 bp, Artificial Sequence
  Synthetic Oligonucleotide
acgaacggccgcttctactctgcga

SEQ ID NO: 4233 - DNA, 25 bp, Artificial Sequence
  Synthetic Oligonucleotide
cttctatacagcctttcctctgaga

SEQ ID NO: 4234 - DNA, 25 bp, Artificial Sequence
  Synthetic Oligonucleotide
agtttcagaattgcttctagacgta

SEQ ID NO: 4235 - DNA, 25 bp, Artificial Sequence
  Synthetic Oligonucleotide
actcccagaagtgtttctagacgta

SEQ ID NO: 4236 - DNA, 25 bp, Artificial Sequence
  Synthetic Oligonucleotide
cctcgggaacgtactgttaagacga

SEQ ID NO: 4237 - DNA, 25 bp, Artificial Sequence
  Synthetic Oligonucleotide
accttcgggatgtctgctcgagtga

SEQ ID NO: 4238 - DNA, 25 bp, Artificial Sequence
  Synthetic Oligonucleotide
aattcgaggttggatgagttacgga

SEQ ID NO: 4239 - DNA, 25 bp, Artificial Sequence
  Synthetic Oligonucleotide
tgtacaggtctgagtcgtacttgga

SEQ ID NO: 4240 - DNA, 25 bp, Artificial Sequence
  Synthetic Oligonucleotide
catctaggtctcagaagcattggta

SEQ ID NO: 4241 - DNA, 25 bp, Artificial Sequence
  Synthetic Oligonucleotide
tcgatgtggtctctgcctttaggta

SEQ ID NO: 4242 - DNA, 25 bp, Artificial Sequence
  Synthetic Oligonucleotide
cggtgacctttacgcgcttaagcga

SEQ ID NO: 4243 - DNA, 25 bp, Artificial Sequence
  Synthetic Oligonucleotide
agtcgatcgattcgacatataatga

SEQ ID NO: 4244 - DNA, 25 bp, Artificial Sequence
  Synthetic Oligonucleotide
agaaactctgttcgtatactgatga

SEQ ID NO: 4245 - DNA, 25 bp, Artificial Sequence
  Synthetic Oligonucleotide
aattactcggtaagcgtcaaagtga

SEQ ID NO: 4246 - DNA, 25 bp, Artificial Sequence
  Synthetic Oligonucleotide
gagagcatgactcgtcctaatggta

SEQ ID NO: 4247 - DNA, 25 bp, Artificial Sequence
  Synthetic Oligonucleotide
tgggcgtcctactggacctaatgga

SEQ ID NO: 4248 - DNA, 25 bp, Artificial Sequence
  Synthetic Oligonucleotide
ggctactcctacagcttcttgtgga

SEQ ID NO: 4249 - DNA, 25 bp, Artificial Sequence
  Synthetic Oligonucleotide
ggcgcctacttaagcttctttagca

SEQ ID NO: 4250 - DNA, 25 bp, Artificial Sequence
  Synthetic Oligonucleotide
gccacgcactctatttttgagctat

SEQ ID NO: 4251 - DNA, 25 bp, Artificial Sequence
  Synthetic Oligonucleotide
tgcccacaacgtcttctaatggctg

SEQ ID NO: 4252 - DNA, 25 bp, Artificial Sequence
  Synthetic Oligonucleotide
ttcaaaaaggaagtacagtgcctgt

SEQ ID NO: 4253 - DNA, 25 bp, Artificial Sequence
  Synthetic Oligonucleotide
attctgaaaagataccgaaggcccg

SEQ ID NO: 4254 - DNA, 25 bp, Artificial Sequence
  Synthetic Oligonucleotide
ttgaaaagacaaggaagtccgtaca

SEQ ID NO: 4255 - DNA, 25 bp, Artificial Sequence
  Synthetic Oligonucleotide
aaataccgtaacgcgttagcgcaca

SEQ ID NO: 4256 - DNA, 25 bp, Artificial Sequence
  Synthetic Oligonucleotide
cttctagttagagacgactaggcca

SEQ ID NO: 4257 - DNA, 25 bp, Artificial Sequence
  Synthetic Oligonucleotide
cacactttacagtgactaggaccac

SEQ ID NO: 4258 - DNA, 25 bp, Artificial Sequence
  Synthetic Oligonucleotide
tacacctgaacctgagtaagtacca

SEQ ID NO: 4259 - DNA, 25 bp, Artificial Sequence
  Synthetic Oligonucleotide
tcgcctgtataggtgtgacaaccga

SEQ ID NO: 4260 - DNA, 25 bp, Artificial Sequence
  Synthetic Oligonucleotide
cgtcgctagtcacgtggctaaacga

SEQ ID NO: 4261 - DNA, 25 bp, Artificial Sequence
  Synthetic Oligonucleotide
accgcgctactaccgaggctaggga

SEQ ID NO: 4262 - DNA, 25 bp, Artificial Sequence
  Synthetic Oligonucleotide
atctacgagaatggaggtcacggca

SEQ ID NO: 4263 - DNA, 25 bp, Artificial Sequence
  Synthetic Oligonucleotide
gataaggtaataaggatcgacgcca

SEQ ID NO: 4264 - DNA, 25 bp, Artificial Sequence
  Synthetic Oligonucleotide
cgaaggtaaggctactcgctaccga

SEQ ID NO: 4265 - DNA, 25 bp, Artificial Sequence
  Synthetic Oligonucleotide
caagtcgagggtttagagctaacga

SEQ ID NO: 4266 - DNA, 25 bp, Artificial Sequence
  Synthetic Oligonucleotide
aaagtagaggtgtactgacaataga

SEQ ID NO: 4267 - DNA, 25 bp, Artificial Sequence
  Synthetic Oligonucleotide
tttacgtgaatgtgaacgaactaca

SEQ ID NO: 4268 - DNA, 25 bp, Artificial Sequence
  Synthetic Oligonucleotide
gcattgctcgcgttgggaacaggaa

SEQ ID NO: 4269 - DNA, 25 bp, Artificial Sequence
  Synthetic Oligonucleotide
gcagccgccgctgttgaagacggaa

SEQ ID NO: 4270 - DNA, 25 bp, Artificial Sequence
  Synthetic Oligonucleotide
ggcggcgagctacctttaacatgaa

SEQ ID NO: 4271 - DNA, 25 bp, Artificial Sequence
  Synthetic Oligonucleotide
agcggtcagccgtagcaaataccag

SEQ ID NO: 4272 - DNA, 25 bp, Artificial Sequence
  Synthetic Oligonucleotide
agcggtcagccgtagcaaataccag

SEQ ID NO: 4273 - DNA, 25 bp, Artificial Sequence
  Synthetic Oligonucleotide
ctgtcggaagcctcccttagtcaca

SEQ ID NO: 4274 - DNA, 25 bp, Artificial Sequence
  Synthetic Oligonucleotide
tgtgcaaccgtcatccctgtgcctt

SEQ ID NO: 4275 - DNA, 25 bp, Artificial Sequence
  Synthetic Oligonucleotide
gtggggaccctcctgctgtcccggt

SEQ ID NO: 4276 - DNA, 25 bp, Artificial Sequence
  Synthetic Oligonucleotide
tgggagccggaccagttcgaccttg

SEQ ID NO: 4277 - DNA, 25 bp, Artificial Sequence
  Synthetic Oligonucleotide
tcggggcctgtagattcccgtagtg

SEQ ID NO: 4278 - DNA, 25 bp, Artificial Sequence
  Synthetic Oligonucleotide
gcgtgggcaacgttcaatcctggtg

SEQ ID NO: 4279 - DNA, 25 bp, Artificial Sequence
  Synthetic Oligonucleotide
tggcctaaaacgtcgaggtcccggg

SEQ ID NO: 4280 - DNA, 25 bp, Artificial Sequence
  Synthetic Oligonucleotide
tagaactcaaaatggaagtcccaga

SEQ ID NO: 4281 - DNA, 25 bp, Artificial Sequence
  Synthetic Oligonucleotide
tagccttgaaagttgaagttcccac

SEQ ID NO: 4282 - DNA, 25 bp, Artificial Sequence
  Synthetic Oligonucleotide
tggcttggggtttgagactctttac

SEQ ID NO: 4283 - DNA, 25 bp, Artificial Sequence
  Synthetic Oligonucleotide
ttgtccaggtaatttggttgcttcg

SEQ ID NO: 4284 - DNA, 25 bp, Artificial Sequence
  Synthetic Oligonucleotide
tttacagcggaatttgtatttcaac

SEQ ID NO: 4285 - DNA, 25 bp, Artificial Sequence
  Synthetic Oligonucleotide
tcacgacgttgactctttatgtcca

SEQ ID NO: 4286 - DNA, 25 bp, Artificial Sequence
  Synthetic Oligonucleotide
tcaacgagtcagtattacatgtaaa

SEQ ID NO: 4287 - DNA, 25 bp, Artificial Sequence
  Synthetic Oligonucleotide
tcctcgtagcagtggtcgtttagga

SEQ ID NO: 4288 - DNA, 25 bp, Artificial Sequence
  Synthetic Oligonucleotide
cgcgcaacgagctgcggctctagga

SEQ ID NO: 4289 - DNA, 25 bp, Artificial Sequence
  Synthetic Oligonucleotide
cgtcgaaacggacgtctgggtatga

SEQ ID NO: 4290 - DNA, 25 bp, Artificial Sequence
  Synthetic Oligonucleotide
gaccatacgtgggtcttcggagtga

SEQ ID NO: 4291 - DNA, 25 bp, Artificial Sequence
  Synthetic Oligonucleotide
agaccctactggaacgggtgtcgga

SEQ ID NO: 4292 - DNA, 25 bp, Artificial Sequence
  Synthetic Oligonucleotide
gaagacctctctccttaggaaagga

SEQ ID NO: 4293 - DNA, 25 bp, Artificial Sequence
  Synthetic Oligonucleotide
aagttcactcttcttcggaagagga

SEQ ID NO: 4294 - DNA, 25 bp, Artificial Sequence
  Synthetic Oligonucleotide
gtccctgttgtgtcggacctaccga

SEQ ID NO: 4295 - DNA, 25 bp, Artificial Sequence
  Synthetic Oligonucleotide
tggtccgctgttcgaactgtttcaa

SEQ ID NO: 4296 - DNA, 25 bp, Artificial Sequence
  Synthetic Oligonucleotide
ggtgcctctgcctcgtggttcactt

SEQ ID NO: 4297 - DNA, 25 bp, Artificial Sequence
  Synthetic Oligonucleotide
ggtgcttccgcttcctgttccactt

SEQ ID NO: 4298 - DNA, 25 bp, Artificial Sequence
  Synthetic Oligonucleotide
tggtatcatccgaaacctttgacaa

SEQ ID NO: 4299 - DNA, 25 bp, Artificial Sequence
  Synthetic Oligonucleotide
taggctctgtggagcagtttgagga

SEQ ID NO: 4300 - DNA, 25 bp, Artificial Sequence
  Synthetic Oligonucleotide
caggactacttgtggcaggtgcaaa

SEQ ID NO: 4301 - DNA, 25 bp, Artificial Sequence
  Synthetic Oligonucleotide
agccttgcgtaacgcaagtgcagca

SEQ ID NO: 4302 - DNA, 25 bp, Artificial Sequence
  Synthetic Oligonucleotide
gggtttcacgaccctaatgtccgca

SEQ ID NO: 4303 - DNA, 25 bp, Artificial Sequence
  Synthetic Oligonucleotide
ggtttcacgaccctaatgtccgcac

SEQ ID NO: 4304 - DNA, 25 bp, Artificial Sequence
  Synthetic Oligonucleotide
gttcgaacggtcatagtctacgtca

SEQ ID NO: 4305 - DNA, 25 bp, Artificial Sequence
  Synthetic Oligonucleotide
agttcgaagaccagtactacttcga

SEQ ID NO: 4306 - DNA, 25 bp, Artificial Sequence
  Synthetic Oligonucleotide
agtgtaacaacgttcgtacaagcga

SEQ ID NO: 4307 - DNA, 25 bp, Artificial Sequence
  Synthetic Oligonucleotide
taataagttcaacagtcaatgacga

SEQ ID NO: 4308 - DNA, 25 bp, Artificial Sequence
  Synthetic Oligonucleotide
ggcagttctacacgtgtcaatgaat

SEQ ID NO: 4309 - DNA, 25 bp, Artificial Sequence
  Synthetic Oligonucleotide
cgagcatcaacactagcagaggtca

SEQ ID NO: 4310 - DNA, 25 bp, Artificial Sequence
  Synthetic Oligonucleotide
agcgatctatcatctatccctgtca

SEQ ID NO: 4311 - DNA, 18 bp, Artificial Sequence
  Synthetic Oligonucleotide
acttgccatcgtagaact

SEQ ID NO: 4312 - DNA, 20 bp, Artificial Sequence
  Synthetic Oligonucleotide
gacttgccatcgtagaactg

SEQ ID NO: 4313 - DNA, 25 bp, Artificial Sequence
  Synthetic Oligonucleotide
aagtggtgtgccttaacatgtgcca

SEQ ID NO: 4314 - DNA, 25 bp, Artificial Sequence
  Synthetic Oligonucleotide
tttggtgttccaagacttagttgca

SEQ ID NO: 4315 - DNA, 25 bp, Artificial Sequence
  Synthetic Oligonucleotide
ttgccgtacctccgtatttaaagca

SEQ ID NO: 4316 - DNA, 25 bp, Artificial Sequence
  Synthetic Oligonucleotide
tcccgctacatcgtttcgaagagga

SEQ ID NO: 4317 - DNA, 25 bp, Artificial Sequence
  Synthetic Oligonucleotide
tcccggtgcatcctatcgaagagga

SEQ ID NO: 4318 - DNA, 25 bp, Artificial Sequence
  Synthetic Oligonucleotide
acgaccaggccagcttacgggagga

SEQ ID NO: 4319 - DNA, 25 bp, Artificial Sequence
  Synthetic Oligonucleotide
acgaaaggccgcatctattcggaga

SEQ ID NO: 4320 - DNA, 25 bp, Artificial Sequence
  Synthetic Oligonucleotide
cgatgatctacctagctaatcagaa

SEQ ID NO: 4321 - DNA, 25 bp, Artificial Sequence
  Synthetic Oligonucleotide
gaaggtcacatcttctaataacgaa

SEQ ID NO: 4322 - DNA, 25 bp, Artificial Sequence
  Synthetic Oligonucleotide
aacttgacgtgtccttaaagacgaa

SEQ ID NO: 4323 - DNA, 25 bp, Artificial Sequence
  Synthetic Oligonucleotide
cttgatgctgccttagactagcaga

SEQ ID NO: 4324 - DNA, 25 bp, Artificial Sequence
  Synthetic Oligonucleotide
cttgatcccgccttagactagcgga

SEQ ID NO: 4325 - DNA, 25 bp, Artificial Sequence
  Synthetic Oligonucleotide
tgtgagcctacccttagagtggaga

SEQ ID NO: 4326 - DNA, 25 bp, Artificial Sequence
  Synthetic Oligonucleotide
cacgtcctacgttacgactgttaga

SEQ ID NO: 4327 - DNA, 25 bp, Artificial Sequence
  Synthetic Oligonucleotide
ttagtcgacgtctagtacttgcgac

SEQ ID NO: 4328 - DNA, 25 bp, Artificial Sequence
  Synthetic Oligonucleotide
cggttgagtcgtcaagactttcgac

SEQ ID NO: 4329 - DNA, 25 bp, Artificial Sequence
  Synthetic Oligonucleotide
cgagtatgaggtggaactgcgcgta

SEQ ID NO: 4330 - DNA, 25 bp, Artificial Sequence
  Synthetic Oligonucleotide
gtatgacagtgttacaacgttcgta

SEQ ID NO: 4331 - DNA, 25 bp, Artificial Sequence
  Synthetic Oligonucleotide
tcttacgactagttcgaactaggta

SEQ ID NO: 4332 - DNA, 17 bp, Artificial Sequence
  Synthetic Oligonucleotide
ttgccatcgtagaactg

SEQ ID NO: 4333 - DNA, 17 bp, Artificial Sequence
  Synthetic Oligonucleotide
cagttctacgatggcaa

SEQ ID NO: 4334 - DNA, 17 bp, Artificial Sequence
  Synthetic Oligonucleotide
ttgccatcgtagaactg

SEQ ID NO: 4335 - DNA, 17 bp, Artificial Sequence
  Synthetic Oligonucleotide
cagttctacgatggcaa

SEQ ID NO: 4336 - DNA, 17 bp, Artificial Sequence
  Synthetic Oligonucleotide
cttgccatcgtagaact

SEQ ID NO: 4337 - DNA, 17 bp, Artificial Sequence
  Synthetic Oligonucleotide
agttctacgatggcaag

SEQ ID NO: 4338 - DNA, 17 bp, Artificial Sequence
  Synthetic Oligonucleotide
cttgccatcgtagaact

SEQ ID NO: 4339 - DNA, 17 bp, Artificial Sequence
  Synthetic Oligonucleotide
agttctacgatggcaag

SEQ ID NO: 4340 - DNA, 17 bp, Artificial Sequence
  Synthetic Oligonucleotide
acttgccatcgtagaac

SEQ ID NO: 4341 - DNA, 17 bp, Artificial Sequence
  Synthetic Oligonucleotide
gttctacgatggcaagt

SEQ ID NO: 4342 - DNA, 17 bp, Artificial Sequence
  Synthetic Oligonucleotide
acttgccatcgtagaac

SEQ ID NO: 4343 - DNA, 17 bp, Artificial Sequence
  Synthetic Oligonucleotide
gttctacgatggcaagt

SEQ ID NO: 4344 - DNA, 17 bp, Artificial Sequence
  Synthetic Oligonucleotide
gacttgccatcgtagaa

SEQ ID NO: 4345 - DNA, 17 bp, Artificial Sequence
  Synthetic Oligonucleotide
ttctacgatggcaagtc

SEQ ID NO: 4346 - DNA, 17 bp, Artificial Sequence
  Synthetic Oligonucleotide
gacttgccatcgtagaa

SEQ ID NO: 4347 - DNA, 17 bp, Artificial Sequence
  Synthetic Oligonucleotide
ttctacgatggcaagtc

SEQ ID NO: 4348 - DNA, 25 bp, Artificial Sequence
  Synthetic Oligonucleotide
atcggttgctgtccacgggaagccc

SEQ ID NO: 4349 - DNA, 25 bp, Artificial Sequence
  Synthetic Oligonucleotide
tcgttgctgcacatgcgttacgcaa

SEQ ID NO: 4350 - DNA, 25 bp, Artificial Sequence
  Synthetic Oligonucleotide
tcgttgactttgatgtcttcgaaga

SEQ ID NO: 4351 - DNA, 25 bp, Artificial Sequence
  Synthetic Oligonucleotide
cgttcaagttcgatgtagcacaaga

SEQ ID NO: 4352 - DNA, 25 bp, Artificial Sequence
  Synthetic Oligonucleotide
cgatccacgttcacgccactagaga

SEQ ID NO: 4353 - DNA, 25 bp, Artificial Sequence
  Synthetic Oligonucleotide
gcgagcaacggcaaccactactgga

SEQ ID NO: 4354 - DNA, 25 bp, Artificial Sequence
  Synthetic Oligonucleotide
gcgagcaacggcaaccactactgga

SEQ ID NO: 4355 - DNA, 25 bp, Artificial Sequence
  Synthetic Oligonucleotide
ccggaagagctagcaccacttctga

SEQ ID NO: 4356 - DNA, 25 bp, Artificial Sequence
  Synthetic Oligonucleotide
acgaacggccgcatctactctgcga

SEQ ID NO: 4357 - DNA, 25 bp, Artificial Sequence
  Synthetic Oligonucleotide
cttctatacagcgtttcctctgaga

SEQ ID NO: 4358 - DNA, 25 bp, Artificial Sequence
  Synthetic Oligonucleotide
agtttcagaattccttctagacgta

SEQ ID NO: 4359 - DNA, 25 bp, Artificial Sequence
  Synthetic Oligonucleotide
actcccagaagtctttctagacgta

SEQ ID NO: 4360 - DNA, 25 bp, Artificial Sequence
  Synthetic Oligonucleotide
cctcgggaacgttctgttaagacga

SEQ ID NO: 4361 - DNA, 25 bp, Artificial Sequence
  Synthetic Oligonucleotide
accttcgggatgactgctcgagtga

SEQ ID NO: 4362 - DNA, 25 bp, Artificial Sequence
  Synthetic Oligonucleotide
aattcgaggttgcatgagttacgga

SEQ ID NO: 4363 - DNA, 25 bp, Artificial Sequence
  Synthetic Oligonucleotide
tgtacaggtctgtgtcgtacttgga

SEQ ID NO: 4364 - DNA, 25 bp, Artificial Sequence
  Synthetic Oligonucleotide
catctaggtctctgaagcattggta

SEQ ID NO: 4365 - DNA, 25 bp, Artificial Sequence
  Synthetic Oligonucleotide
tcgatgtggtctgtgcctttaggta

SEQ ID NO: 4366 - DNA, 25 bp, Artificial Sequence
  Synthetic Oligonucleotide
cggtgacctttaggcgcttaagcga

SEQ ID NO: 4367 - DNA, 25 bp, Artificial Sequence
  Synthetic Oligonucleotide
agtcgatcgattggacatataatga

SEQ ID NO: 4368 - DNA, 25 bp, Artificial Sequence
  Synthetic Oligonucleotide
agaaactctgttggtatactgatga

SEQ ID NO: 4369 - DNA, 25 bp, Artificial Sequence
  Synthetic Oligonucleotide
aattactcggtatgcgtcaaagtga

SEQ ID NO: 4370 - DNA, 25 bp, Artificial Sequence
  Synthetic Oligonucleotide
gagagcatgactggtcctaatggta

SEQ ID NO: 4371 - DNA, 25 bp, Artificial Sequence
  Synthetic Oligonucleotide
tgggcgtcctacaggacctaatgga

SEQ ID NO: 4372 - DNA, 25 bp, Artificial Sequence
  Synthetic Oligonucleotide
ggctactcctactgcttcttgtgga

SEQ ID NO: 4373 - DNA, 25 bp, Artificial Sequence
  Synthetic Oligonucleotide
ggcgcctacttatgcttctttagca

SEQ ID NO: 4374 - DNA, 25 bp, Artificial Sequence
  Synthetic Oligonucleotide
gccacgcactctttttttgagctat

SEQ ID NO: 4375 - DNA, 25 bp, Artificial Sequence
  Synthetic Oligonucleotide
tgcccacaacgtgttctaatggctg

SEQ ID NO: 4376 - DNA, 25 bp, Artificial Sequence
  Synthetic Oligonucleotide
ttcaaaaaggaactacagtgcctgt

SEQ ID NO: 4377 - DNA, 25 bp, Artificial Sequence
  Synthetic Oligonucleotide
attctgaaaagaaaccgaaggcccg

SEQ ID NO: 4378 - DNA, 25 bp, Artificial Sequence
  Synthetic Oligonucleotide
ttgaaaagacaacgaagtccgtaca

SEQ ID NO: 4379 - DNA, 25 bp, Artificial Sequence
  Synthetic Oligonucleotide
aaataccgtaacccgttagcgcaca

SEQ ID NO: 4380 - DNA, 25 bp, Artificial Sequence
  Synthetic Oligonucleotide
cttctagttagacacgactaggcca

SEQ ID NO: 4381 - DNA, 25 bp, Artificial Sequence
  Synthetic Oligonucleotide
cacactttacagagactaggaccac

SEQ ID NO: 4382 - DNA, 25 bp, Artificial Sequence
  Synthetic Oligonucleotide
tacacctgaaccagagtaagtacca

SEQ ID NO: 4383 - DNA, 25 bp, Artificial Sequence
  Synthetic Oligonucleotide
tcgcctgtatagctgtgacaaccga

SEQ ID NO: 4384 - DNA, 25 bp, Artificial Sequence
  Synthetic Oligonucleotide
cgtcgctagtcaggtggctaaacga

SEQ ID NO: 4385 - DNA, 25 bp, Artificial Sequence
  Synthetic Oligonucleotide
accgcgctactagcgaggctaggga

SEQ ID NO: 4386 - DNA, 25 bp, Artificial Sequence
  Synthetic Oligonucleotide
atctacgagaatcgaggtcacggca

SEQ ID NO: 4387 - DNA, 25 bp, Artificial Sequence
  Synthetic Oligonucleotide
gataaggtaatatggatcgacgcca

SEQ ID NO: 4388 - DNA, 25 bp, Artificial Sequence
  Synthetic Oligonucleotide
cgaaggtaaggcaactcgctaccga

SEQ ID NO: 4389 - DNA, 25 bp, Artificial Sequence
  Synthetic Oligonucleotide
caagtcgagggtatagagctaacga

SEQ ID NO: 4390 - DNA, 25 bp, Artificial Sequence
  Synthetic Oligonucleotide
aaagtagaggtgaactgacaataga

SEQ ID NO: 4391 - DNA, 25 bp, Artificial Sequence
  Synthetic Oligonucleotide
tttacgtgaatgagaacgaactaca

SEQ ID NO: 4392 - DNA, 25 bp, Artificial Sequence
  Synthetic Oligonucleotide
gcattgctcgcgatgggaacaggaa

SEQ ID NO: 4393 - DNA, 25 bp, Artificial Sequence
  Synthetic Oligonucleotide
gcagccgccgctcttgaagacggaa

SEQ ID NO: 4394 - DNA, 25 bp, Artificial Sequence
  Synthetic Oligonucleotide
ggcggcgagctagctttaacatgaa

SEQ ID NO: 4395 - DNA, 25 bp, Artificial Sequence
  Synthetic Oligonucleotide
agcggtcagccgaagcaaataccag

SEQ ID NO: 4396 - DNA, 25 bp, Artificial Sequence
  Synthetic Oligonucleotide
agcggtcagccgaagcaaataccag

SEQ ID NO: 4397 - DNA, 25 bp, Artificial Sequence
  Synthetic Oligonucleotide
ctgtcggaagccacccttagtcaca

SEQ ID NO: 4398 - DNA, 25 bp, Artificial Sequence
  Synthetic Oligonucleotide
tgtgcaaccgtcttccctgtgcctt

SEQ ID NO: 4399 - DNA, 25 bp, Artificial Sequence
  Synthetic Oligonucleotide
gtggggaccctcgtgctgtcccggt

SEQ ID NO: 4400 - DNA, 25 bp, Artificial Sequence
  Synthetic Oligonucleotide
tgggagccggacgagttcgaccttg

SEQ ID NO: 4401 - DNA, 25 bp, Artificial Sequence
  Synthetic Oligonucleotide
tcggggcctgtacattcccgtagtg

SEQ ID NO: 4402 - DNA, 25 bp, Artificial Sequence
  Synthetic Oligonucleotide
gcgtgggcaacgatcaatcctggtg

SEQ ID NO: 4403 - DNA, 25 bp, Artificial Sequence
  Synthetic Oligonucleotide
tggcctaaaacgacgaggtcccggg

SEQ ID NO: 4404 - DNA, 25 bp, Artificial Sequence
  Synthetic Oligonucleotide
tagaactcaaaaaggaagtcccaga

SEQ ID NO: 4405 - DNA, 25 bp, Artificial Sequence
  Synthetic Oligonucleotide
tagccttgaaagatgaagttcccac

SEQ ID NO: 4406 - DNA, 25 bp, Artificial Sequence
  Synthetic Oligonucleotide
tggcttggggttagagactctttac

SEQ ID NO: 4407 - DNA, 25 bp, Artificial Sequence
  Synthetic Oligonucleotide
ttgtccaggtaaattggttgcttcg

SEQ ID NO: 4408 - DNA, 25 bp, Artificial Sequence
  Synthetic Oligonucleotide
tttacagcggaaattgtatttcaac

SEQ ID NO: 4409 - DNA, 25 bp, Artificial Sequence
  Synthetic Oligonucleotide
tcacgacgttgagtctttatgtcca

SEQ ID NO: 4410 - DNA, 25 bp, Artificial Sequence
  Synthetic Oligonucleotide
tcaacgagtcagaattacatgtaaa

SEQ ID NO: 4411 - DNA, 25 bp, Artificial Sequence
  Synthetic Oligonucleotide
tcctcgtagcagaggtcgtttagga

SEQ ID NO: 4412 - DNA, 25 bp, Artificial Sequence
  Synthetic Oligonucleotide
cgcgcaacgagcagcggctctagga

SEQ ID NO: 4413 - DNA, 25 bp, Artificial Sequence
  Synthetic Oligonucleotide
cgtcgaaacggaggtctgggtatga

SEQ ID NO: 4414 - DNA, 25 bp, Artificial Sequence
  Synthetic Oligonucleotide
gaccatacgtggctcttcggagtga

SEQ ID NO: 4415 - DNA, 25 bp, Artificial Sequence
  Synthetic Oligonucleotide
agaccctactggtacgggtgtcgga

SEQ ID NO: 4416 - DNA, 25 bp, Artificial Sequence
  Synthetic Oligonucleotide
gaagacctctctgcttaggaaagga

SEQ ID NO: 4417 - DNA, 25 bp, Artificial Sequence
  Synthetic Oligonucleotide
aagttcactcttgttcggaagagga

SEQ ID NO: 4418 - DNA, 25 bp, Artificial Sequence
  Synthetic Oligonucleotide
gtccctgttgtgacggacctaccga

SEQ ID NO: 4419 - DNA, 25 bp, Artificial Sequence
  Synthetic Oligonucleotide
tggtccgctgttggaactgtttcaa

SEQ ID NO: 4420 - DNA, 25 bp, Artificial Sequence
  Synthetic Oligonucleotide
ggtgcctctgccacgtggttcactt

SEQ ID NO: 4421 - DNA, 25 bp, Artificial Sequence
  Synthetic Oligonucleotide
ggtgcttccgctacctgttccactt

SEQ ID NO: 4422 - DNA, 25 bp, Artificial Sequence
  Synthetic Oligonucleotide
tggtatcatccgtaacctttgacaa

SEQ ID NO: 4423 - DNA, 25 bp, Artificial Sequence
  Synthetic Oligonucleotide
taggctctgtggtgcagtttgagga

SEQ ID NO: 4424 - DNA, 25 bp, Artificial Sequence
  Synthetic Oligonucleotide
caggactacttgaggcaggtgcaaa

SEQ ID NO: 4425 - DNA, 25 bp, Artificial Sequence
  Synthetic Oligonucleotide
agccttgcgtaaggcaagtgcagca

SEQ ID NO: 4426 - DNA, 25 bp, Artificial Sequence
  Synthetic Oligonucleotide
gggtttcacgacgctaatgtccgca

SEQ ID NO: 4427 - DNA, 25 bp, Artificial Sequence
  Synthetic Oligonucleotide
ggtttcacgaccgtaatgtccgcac

SEQ ID NO: 4428 - DNA, 25 bp, Artificial Sequence
  Synthetic Oligonucleotide
gttcgaacggtcttagtctacgtca

SEQ ID NO: 4429 - DNA, 25 bp, Artificial Sequence
  Synthetic Oligonucleotide
agttcgaagacctgtactacttcga

SEQ ID NO: 4430 - DNA, 25 bp, Artificial Sequence
  Synthetic Oligonucleotide
agtgtaacaacgatcgtacaagcga

SEQ ID NO: 4431 - DNA, 25 bp, Artificial Sequence
  Synthetic Oligonucleotide
taataagttcaagagtcaatgacga

SEQ ID NO: 4432 - DNA, 25 bp, Artificial Sequence
  Synthetic Oligonucleotide
ggcagttctacaggtgtcaatgaat

SEQ ID NO: 4433 - DNA, 25 bp, Artificial Sequence
  Synthetic Oligonucleotide
cgagcatcaacagtagcagaggtca

SEQ ID NO: 4434 - DNA, 25 bp, Artificial Sequence
  Synthetic Oligonucleotide
agcgatctatcaactatccctgtca

SEQ ID NO: 4435 - DNA, 20 bp, Artificial Sequence
  Synthetic Oligonucleotide
gacttgccatcgtagaactg

SEQ ID NO: 4436 - DNA, 25 bp, Artificial Sequence
  Synthetic Oligonucleotide
aggacttgccatcgtagaactgctg

SEQ ID NO: 4437 - DNA, 25 bp, Artificial Sequence
  Synthetic Oligonucleotide
aggaatgcctatagttacagcgtga

SEQ ID NO: 4438 - DNA, 25 bp, Artificial Sequence
  Synthetic Oligonucleotide
tgaattcactaaacttagacctaga

SEQ ID NO: 4439 - DNA, 25 bp, Artificial Sequence
  Synthetic Oligonucleotide
gtcgagatctcttcaattaagtgaa

SEQ ID NO: 4440 - DNA, 25 bp, Artificial Sequence
  Synthetic Oligonucleotide
ttgcgaaccccaatataagacgtaa

SEQ ID NO: 4441 - DNA, 25 bp, Artificial Sequence
  Synthetic Oligonucleotide
ttgccgactcaaattacgaagttca

SEQ ID NO: 4442 - DNA, 25 bp, Artificial Sequence
  Synthetic Oligonucleotide
ctgacacggcaacttaaacggcact

SEQ ID NO: 4443 - DNA, 25 bp, Artificial Sequence
  Synthetic Oligonucleotide
cggtaaggcagacgttaaacgtaaa

SEQ ID NO: 4444 - DNA, 25 bp, Artificial Sequence
  Synthetic Oligonucleotide
ggaaacccacgatatgtacttaaac

SEQ ID NO: 4445 - DNA, 25 bp, Artificial Sequence
  Synthetic Oligonucleotide
ggagatccttagttttcattgtaac

SEQ ID NO: 4446 - DNA, 25 bp, Artificial Sequence
  Synthetic Oligonucleotide
ggaatgcctatagttacagcgtgaa

SEQ ID NO: 4447 - DNA, 25 bp, Artificial Sequence
  Synthetic Oligonucleotide
gactaaattactcggtaagcgtcaa

SEQ ID NO: 4448 - DNA, 25 bp, Artificial Sequence
  Synthetic Oligonucleotide
gcaaaactattcctcgttaaggaaa

SEQ ID NO: 4449 - DNA, 25 bp, Artificial Sequence
  Synthetic Oligonucleotide
cgacaaaattcgcgtcaaggcgaac

SEQ ID NO: 4450 - DNA, 25 bp, Artificial Sequence
  Synthetic Oligonucleotide
agaacaccagttcgtcttgaaggaa

SEQ ID NO: 4451 - DNA, 25 bp, Artificial Sequence
  Synthetic Oligonucleotide
atcctcggtctcgtcattagaggaa

SEQ ID NO: 4452 - DNA, 25 bp, Artificial Sequence
  Synthetic Oligonucleotide
ctacggtccccgtgacgacgtgaga

SEQ ID NO: 4453 - DNA, 25 bp, Artificial Sequence
  Synthetic Oligonucleotide
ccgacatgaccggggacgactagga

SEQ ID NO: 4454 - DNA, 25 bp, Artificial Sequence
  Synthetic Oligonucleotide
cctcaaatctacgttgcggctagga

SEQ ID NO: 4455 - DNA, 25 bp, Artificial Sequence
  Synthetic Oligonucleotide
cacatttactttcgtagactgagtt

SEQ ID NO: 4456 - DNA, 17 bp, Artificial Sequence
  Synthetic Oligonucleotide
cagttctacgatggcaa

SEQ ID NO: 4457 - DNA, 17 bp, Artificial Sequence
  Synthetic Oligonucleotide
ttgccatcgtagaactg

SEQ ID NO: 4458 - DNA, 17 bp, Artificial Sequence
  Synthetic Oligonucleotide
cagttctacgatggcaa

SEQ ID NO: 4459 - DNA, 17 bp, Artificial Sequence
  Synthetic Oligonucleotide
ttgccatcgtagaactg

SEQ ID NO: 4460 - DNA, 17 bp, Artificial Sequence
  Synthetic Oligonucleotide
agttctacgatggcaag

SEQ ID NO: 4461 - DNA, 17 bp, Artificial Sequence
  Synthetic Oligonucleotide
cttgccatcgtagaact

SEQ ID NO: 4462 - DNA, 17 bp, Artificial Sequence
  Synthetic Oligonucleotide
agttctacgatggcaag

SEQ ID NO: 4463 - DNA, 17 bp, Artificial Sequence
  Synthetic Oligonucleotide
cttgccatcgtagaact

SEQ ID NO: 4464 - DNA, 17 bp, Artificial Sequence
  Synthetic Oligonucleotide
gttctacgatggcaagt

SEQ ID NO: 4465 - DNA, 17 bp, Artificial Sequence
  Synthetic Oligonucleotide
acttgccatcgtagaac

SEQ ID NO: 4466 - DNA, 17 bp, Artificial Sequence
  Synthetic Oligonucleotide
gttctacgatggcaagt

SEQ ID NO: 4467 - DNA, 17 bp, Artificial Sequence
  Synthetic Oligonucleotide
acttgccatcgtagaac

SEQ ID NO: 4468 - DNA, 17 bp, Artificial Sequence
  Synthetic Oligonucleotide
ttctacgatggcaagtc

SEQ ID NO: 4469 - DNA, 17 bp, Artificial Sequence
  Synthetic Oligonucleotide
gacttgccatcgtagaa

SEQ ID NO: 4470 - DNA, 17 bp, Artificial Sequence
  Synthetic Oligonucleotide
ttctacgatggcaagtc

SEQ ID NO: 4471 - DNA, 17 bp, Artificial Sequence
  Synthetic Oligonucleotide
gacttgccatcgtagaa

SEQ ID NO: 4472 - DNA, 25 bp, Artificial Sequence
  Synthetic Oligonucleotide
agtccttcttcctgtctaaggaccc

SEQ ID NO: 4473 - DNA, 25 bp, Artificial Sequence
  Synthetic Oligonucleotide
gcgatttatctctcgtaggtgtgga

SEQ ID NO: 4474 - DNA, 25 bp, Artificial Sequence
  Synthetic Oligonucleotide
tttcagtacctcgtgtaggtaagga

SEQ ID NO: 4475 - DNA, 25 bp, Artificial Sequence
  Synthetic Oligonucleotide
attaaacgcgcggacgacggaagga

SEQ ID NO: 4476 - DNA, 25 bp, Artificial Sequence
  Synthetic Oligonucleotide
agtcaaacgccgtcgccgttgcgac

SEQ ID NO: 4477 - DNA, 25 bp, Artificial Sequence
  Synthetic Oligonucleotide
tgttagaacctcctaccacagtgga

SEQ ID NO: 4478 - DNA, 25 bp, Artificial Sequence
  Synthetic Oligonucleotide
gattaaagtctctgaccacctgaac

SEQ ID NO: 4479 - DNA, 25 bp, Artificial Sequence
  Synthetic Oligonucleotide
tagctaagagttttaccgcactcca

SEQ ID NO: 4480 - DNA, 25 bp, Artificial Sequence
  Synthetic Oligonucleotide
cgagtcacaggaacgaccccaccca

SEQ ID NO: 4481 - DNA, 25 bp, Artificial Sequence
  Synthetic Oligonucleotide
cgtctccagtgacacgttccatgga

SEQ ID NO: 4482 - DNA, 25 bp, Artificial Sequence
  Synthetic Oligonucleotide
cgtcagcatttaacttggtatagga

SEQ ID NO: 4483 - DNA, 25 bp, Artificial Sequence
  Synthetic Oligonucleotide
ctcccacggttttcagagtatccga

SEQ ID NO: 4484 - DNA, 25 bp, Artificial Sequence
  Synthetic Oligonucleotide
cccgtagtgtctggacaataacgga

SEQ ID NO: 4485 - DNA, 25 bp, Artificial Sequence
  Synthetic Oligonucleotide
cccgtagtgtctggacaataacgga

SEQ ID NO: 4486 - DNA, 25 bp, Artificial Sequence
  Synthetic Oligonucleotide
cccgtagtgtctggacaataacgga

SEQ ID NO: 4487 - DNA, 25 bp, Artificial Sequence
  Synthetic Oligonucleotide
ctcttagtgttgtactaatccggac

SEQ ID NO: 4488 - DNA, 25 bp, Artificial Sequence
  Synthetic Oligonucleotide
cgtgttactgtctgcgaaattctaa

SEQ ID NO: 4489 - DNA, 25 bp, Artificial Sequence
  Synthetic Oligonucleotide
gtcatgtcgattttaagcattctaa

SEQ ID NO: 4490 - DNA, 25 bp, Artificial Sequence
  Synthetic Oligonucleotide
catggacttttaacgctaactaaga

SEQ ID NO: 4491 - DNA, 25 bp, Artificial Sequence
  Synthetic Oligonucleotide
agtgtaacagttaccatagacttga

SEQ ID NO: 4492 - DNA, 25 bp, Artificial Sequence
  Synthetic Oligonucleotide
agtgtaacagttaccatagacttga

SEQ ID NO: 4493 - DNA, 25 bp, Artificial Sequence
  Synthetic Oligonucleotide
gcttactactttgctaacatgtcga

SEQ ID NO: 4494 - DNA, 25 bp, Artificial Sequence
  Synthetic Oligonucleotide
gcgtactactgtcgtcgttttgcga

SEQ ID NO: 4495 - DNA, 25 bp, Artificial Sequence
  Synthetic Oligonucleotide
agcggcgtcatgaggctgttacgcc

SEQ ID NO: 4496 - DNA, 25 bp, Artificial Sequence
  Synthetic Oligonucleotide
cagggagttattaaggcttcaacag

SEQ ID NO: 4497 - DNA, 25 bp, Artificial Sequence
  Synthetic Oligonucleotide
aggagttagacggcttacacgacga

SEQ ID NO: 4498 - DNA, 25 bp, Artificial Sequence
  Synthetic Oligonucleotide
gcaagttttacggctactagagaga

SEQ ID NO: 4499 - DNA, 25 bp, Artificial Sequence
  Synthetic Oligonucleotide
ctgcgacaggtttgtcttaggtaaa

SEQ ID NO: 4500 - DNA, 25 bp, Artificial Sequence
  Synthetic Oligonucleotide
tctagaagaggtacagcagggtcaa

SEQ ID NO: 4501 - DNA, 25 bp, Artificial Sequence
  Synthetic Oligonucleotide
ctagaagaggtacagcagggtcaac

SEQ ID NO: 4502 - DNA, 25 bp, Artificial Sequence
  Synthetic Oligonucleotide
ttagaagaggtatagcagggtcaac

SEQ ID NO: 4503 - DNA, 25 bp, Artificial Sequence
  Synthetic Oligonucleotide
tgtagagaaggtttcccagctctaa

SEQ ID NO: 4504 - DNA, 25 bp, Artificial Sequence
  Synthetic Oligonucleotide
agaataaggttatcagtacaagcaa

SEQ ID NO: 4505 - DNA, 25 bp, Artificial Sequence
  Synthetic Oligonucleotide
gtctagaagaggtacagcagggtca

SEQ ID NO: 4506 - DNA, 25 bp, Artificial Sequence
  Synthetic Oligonucleotide
gtctagaagaggtacagcagggtca

SEQ ID NO: 4507 - DNA, 25 bp, Artificial Sequence
  Synthetic Oligonucleotide
tataaagaagactcgcagaagacga

SEQ ID NO: 4508 - DNA, 25 bp, Artificial Sequence
  Synthetic Oligonucleotide
tagttgtccaacgtcgcttaaacga

SEQ ID NO: 4509 - DNA, 25 bp, Artificial Sequence
  Synthetic Oligonucleotide
atcttccacactacggtctagaaga

SEQ ID NO: 4510 - DNA, 25 bp, Artificial Sequence
  Synthetic Oligonucleotide
atcttccacactacggtctagaaga

SEQ ID NO: 4511 - DNA, 25 bp, Artificial Sequence
  Synthetic Oligonucleotide
agatatgacaactgggttacgcaga

SEQ ID NO: 4512 - DNA, 25 bp, Artificial Sequence
  Synthetic Oligonucleotide
aagtggtacaaccggtccgaccaga

SEQ ID NO: 4513 - DNA, 25 bp, Artificial Sequence
  Synthetic Oligonucleotide
tcactagaggaacgagtatgccaga

SEQ ID NO: 4514 - DNA, 25 bp, Artificial Sequence
  Synthetic Oligonucleotide
ccctacgggaggaacaggacctaga

SEQ ID NO: 4515 - DNA, 25 bp, Artificial Sequence
  Synthetic Oligonucleotide
ccctacgggaggaacaggacctaga

SEQ ID NO: 4516 - DNA, 25 bp, Artificial Sequence
  Synthetic Oligonucleotide
accgtactagcatgaagagcaccaa

SEQ ID NO: 4517 - DNA, 25 bp, Artificial Sequence
  Synthetic Oligonucleotide
tcgtttctagttagagacgaccaga

SEQ ID NO: 4518 - DNA, 25 bp, Artificial Sequence
  Synthetic Oligonucleotide
actgttcctcgtgttcacagtcaca

SEQ ID NO: 4519 - DNA, 25 bp, Artificial Sequence
  Synthetic Oligonucleotide
tagtcgccgttctacgcagtcgtga

SEQ ID NO: 4520 - DNA, 25 bp, Artificial Sequence
  Synthetic Oligonucleotide
agttcgaccgaatacggtaacgtga

SEQ ID NO: 4521 - DNA, 25 bp, Artificial Sequence
  Synthetic Oligonucleotide
gaacttcgccggcaccggtagagga

SEQ ID NO: 4522 - DNA, 25 bp, Artificial Sequence
  Synthetic Oligonucleotide
ttaaaaacccgttgccttagagaga

SEQ ID NO: 4523 - DNA, 25 bp, Artificial Sequence
  Synthetic Oligonucleotide
taacagttatcatagccttgaaagt

SEQ ID NO: 4524 - DNA, 25 bp, Artificial Sequence
  Synthetic Oligonucleotide
caacgaggttcaaattcttaaaagt

SEQ ID NO: 4525 - DNA, 25 bp, Artificial Sequence
  Synthetic Oligonucleotide
accccgggtcatatgtttttgaacg

SEQ ID NO: 4526 - DNA, 25 bp, Artificial Sequence
  Synthetic Oligonucleotide
cctgttgtaccgatgatttatggcg

SEQ ID NO: 4527 - DNA, 25 bp, Artificial Sequence
  Synthetic Oligonucleotide
actcctttagccatctttgctggag

SEQ ID NO: 4528 - DNA, 25 bp, Artificial Sequence
  Synthetic Oligonucleotide
tccactgccaattccttgacgtggg

SEQ ID NO: 4529 - DNA, 25 bp, Artificial Sequence
  Synthetic Oligonucleotide
tccgaaaccaagtcgagggtttaga

SEQ ID NO: 4530 - DNA, 25 bp, Artificial Sequence
  Synthetic Oligonucleotide
tccgaaagcgggtaacaggttataa

SEQ ID NO: 4531 - DNA, 25 bp, Artificial Sequence
  Synthetic Oligonucleotide
cgtaacagcagactacaggtttaaa

SEQ ID NO: 4532 - DNA, 25 bp, Artificial Sequence
  Synthetic Oligonucleotide
cccccgtacgaaatctgagtttaaa

SEQ ID NO: 4533 - DNA, 25 bp, Artificial Sequence
  Synthetic Oligonucleotide
cgtccacggaaacgtctttgtttca

SEQ ID NO: 4534 - DNA, 25 bp, Artificial Sequence
  Synthetic Oligonucleotide
cttcaggagggacttatgttagaca

SEQ ID NO: 4535 - DNA, 25 bp, Artificial Sequence
  Synthetic Oligonucleotide
ttctcaggagggtaggagttcaaca

SEQ ID NO: 4536 - DNA, 25 bp, Artificial Sequence
  Synthetic Oligonucleotide
agtcctcgggcatagagtcccacca

SEQ ID NO: 4537 - DNA, 25 bp, Artificial Sequence
  Synthetic Oligonucleotide
cccgcgctcaactatcgaccgacca

SEQ ID NO: 4538 - DNA, 25 bp, Artificial Sequence
  Synthetic Oligonucleotide
acacccgctcgtggaacaccggcaa

SEQ ID NO: 4539 - DNA, 25 bp, Artificial Sequence
  Synthetic Oligonucleotide
aaccccttcaggtccgggtcgaact

SEQ ID NO: 4540 - DNA, 25 bp, Artificial Sequence
  Synthetic Oligonucleotide
agcactctgtcaagccagggataga

SEQ ID NO: 4541 - DNA, 25 bp, Artificial Sequence
  Synthetic Oligonucleotide
aactgtcactgaaacccggggaaga

SEQ ID NO: 4542 - DNA, 25 bp, Artificial Sequence
  Synthetic Oligonucleotide
tgccagaacgtgacgacgggataga

SEQ ID NO: 4543 - DNA, 25 bp, Artificial Sequence
  Synthetic Oligonucleotide
ggcagtccgtcgagtatcgagaaga

SEQ ID NO: 4544 - DNA, 25 bp, Artificial Sequence
  Synthetic Oligonucleotide
cggccagtcccagtagtcggagaga

SEQ ID NO: 4545 - DNA, 25 bp, Artificial Sequence
  Synthetic Oligonucleotide
accggtccccacgattcgtcaacca

SEQ ID NO: 4546 - DNA, 25 bp, Artificial Sequence
  Synthetic Oligonucleotide
ggtcggtctccctaatttccacaca

SEQ ID NO: 4547 - DNA, 25 bp, Artificial Sequence
  Synthetic Oligonucleotide
ggggcagcgcataaattcagcagac

SEQ ID NO: 4548 - DNA, 25 bp, Artificial Sequence
  Synthetic Oligonucleotide
gcgtcagacgctagcagtgcaggaa

SEQ ID NO: 4549 - DNA, 25 bp, Artificial Sequence
  Synthetic Oligonucleotide
acgaagtgatggaagaactacagca

SEQ ID NO: 4550 - DNA, 25 bp, Artificial Sequence
  Synthetic Oligonucleotide
cagaaaaagtctaagaccccgtcga

SEQ ID NO: 4551 - DNA, 25 bp, Artificial Sequence
  Synthetic Oligonucleotide
ccaatataagacgtaatgcccgtac

SEQ ID NO: 4552 - DNA, 25 bp, Artificial Sequence
  Synthetic Oligonucleotide
accagtatataagtcgcactgcaaa

SEQ ID NO: 4553 - DNA, 25 bp, Artificial Sequence
  Synthetic Oligonucleotide
accatttcaatgaatgcgtctacga

SEQ ID NO: 4554 - DNA, 25 bp, Artificial Sequence
  Synthetic Oligonucleotide
tccatggtctaaagtttaaactcga

SEQ ID NO: 4555 - DNA, 25 bp, Artificial Sequence
  Synthetic Oligonucleotide
ctattggttagtgatagaaacctcc

SEQ ID NO: 4556 - DNA, 25 bp, Artificial Sequence
  Synthetic Oligonucleotide
aacttgtgacttgatgacaccccat

SEQ ID NO: 4557 - DNA, 25 bp, Artificial Sequence
  Synthetic Oligonucleotide
ctaggtgttgactatgtaaccccca

SEQ ID NO: 4558 - DNA, 25 bp, Artificial Sequence
  Synthetic Oligonucleotide
gtgtgaacatcaacgtgaccgccca

SEQ ID NO: 4559 - DNA, 25 bp, Artificial Sequence
  Synthetic Oligonucleotide
aggacttgccatcgtagaactgctg

SEQ ID NO: 4560 - DNA, 20 bp, Artificial Sequence
  Synthetic Oligonucleotide
cagttctacgatggcaagtc

SEQ ID NO: 4561 - DNA, 25 bp, Artificial Sequence
  Synthetic Oligonucleotide
aggaatgcctattgttacagcgtga

SEQ ID NO: 4562 - DNA, 25 bp, Artificial Sequence
  Synthetic Oligonucleotide
tgaattcactaatcttagacctaga

SEQ ID NO: 4563 - DNA, 25 bp, Artificial Sequence
  Synthetic Oligonucleotide
gtcgagatctctacaattaagtgaa

SEQ ID NO: 4564 - DNA, 25 bp, Artificial Sequence
  Synthetic Oligonucleotide
ttgcgaaccccattataagacgtaa

SEQ ID NO: 4565 - DNA, 25 bp, Artificial Sequence
  Synthetic Oligonucleotide
ttgccgactcaatttacgaagttca

SEQ ID NO: 4566 - DNA, 25 bp, Artificial Sequence
  Synthetic Oligonucleotide
ctgacacggcaagttaaacggcact

SEQ ID NO: 4567 - DNA, 25 bp, Artificial Sequence
  Synthetic Oligonucleotide
cggtaaggcagaggttaaacgtaaa

SEQ ID NO: 4568 - DNA, 25 bp, Artificial Sequence
  Synthetic Oligonucleotide
ggaaacccacgaaatgtacttaaac

SEQ ID NO: 4569 - DNA, 25 bp, Artificial Sequence
  Synthetic Oligonucleotide
ggagatccttagatttcattgtaac

SEQ ID NO: 4570 - DNA, 25 bp, Artificial Sequence
  Synthetic Oligonucleotide
ggaatgcctatacttacagcgtgaa

SEQ ID NO: 4571 - DNA, 25 bp, Artificial Sequence
  Synthetic Oligonucleotide
gactaaattactgggtaagcgtcaa

SEQ ID NO: 4572 - DNA, 25 bp, Artificial Sequence
  Synthetic Oligonucleotide
gcaaaactattcgtcgttaaggaaa

SEQ ID NO: 4573 - DNA, 25 bp, Artificial Sequence
  Synthetic Oligonucleotide
cgacaaaattcgggtcaaggcgaac

SEQ ID NO: 4574 - DNA, 25 bp, Artificial Sequence
  Synthetic Oligonucleotide
agaacaccagttggtcttgaaggaa

SEQ ID NO: 4575 - DNA, 25 bp, Artificial Sequence
  Synthetic Oligonucleotide
atcctcggtctcctcattagaggaa

SEQ ID NO: 4576 - DNA, 25 bp, Artificial Sequence
  Synthetic Oligonucleotide
ctacggtccccgagacgacgtgaga

SEQ ID NO: 4577 - DNA, 25 bp, Artificial Sequence
  Synthetic Oligonucleotide
ccgacatgaccgcggacgactagga

SEQ ID NO: 4578 - DNA, 25 bp, Artificial Sequence
  Synthetic Oligonucleotide
cctcaaatctaccttgcggctagga

SEQ ID NO: 4579 - DNA, 25 bp, Artificial Sequence
  Synthetic Oligonucleotide
cacatttactttggtagactgagtt

SEQ ID NO: 4580 - DNA, 17 bp, Artificial Sequence
  Synthetic Oligonucleotide
ttgccatcgtagaactg

SEQ ID NO: 4581 - DNA, 17 bp, Artificial Sequence
  Synthetic Oligonucleotide
cagttctacgatggcaa

SEQ ID NO: 4582 - DNA, 17 bp, Artificial Sequence
  Synthetic Oligonucleotide
ttgccatcgtagaactg

SEQ ID NO: 4583 - DNA, 17 bp, Artificial Sequence
  Synthetic Oligonucleotide
cagttctacgatggcaa

SEQ ID NO: 4584 - DNA, 17 bp, Artificial Sequence
  Synthetic Oligonucleotide
cttgccatcgtagaact

SEQ ID NO: 4585 - DNA, 17 bp, Artificial Sequence
  Synthetic Oligonucleotide
agttctacgatggcaag

SEQ ID NO: 4586 - DNA, 17 bp, Artificial Sequence
  Synthetic Oligonucleotide
cttgccatcgtagaact

SEQ ID NO: 4587 - DNA, 17 bp, Artificial Sequence
  Synthetic Oligonucleotide
agttctacgatggcaag

SEQ ID NO: 4588 - DNA, 17 bp, Artificial Sequence
  Synthetic Oligonucleotide
acttgccatcgtagaac

SEQ ID NO: 4589 - DNA, 17 bp, Artificial Sequence
  Synthetic Oligonucleotide
gttctacgatggcaagt

SEQ ID NO: 4590 - DNA, 17 bp, Artificial Sequence
  Synthetic Oligonucleotide
acttgccatcgtagaac

SEQ ID NO: 4591 - DNA, 17 bp, Artificial Sequence
  Synthetic Oligonucleotide
gttctacgatggcaagt

SEQ ID NO: 4592 - DNA, 17 bp, Artificial Sequence
  Synthetic Oligonucleotide
gacttgccatcgtagaa

SEQ ID NO: 4593 - DNA, 17 bp, Artificial Sequence
  Synthetic Oligonucleotide
ttctacgatggcaagtc

SEQ ID NO: 4594 - DNA, 17 bp, Artificial Sequence
  Synthetic Oligonucleotide
gacttgccatcgtagaa

SEQ ID NO: 4595 - DNA, 17 bp, Artificial Sequence
  Synthetic Oligonucleotide
ttctacgatggcaagtc

SEQ ID NO: 4596 - DNA, 25 bp, Artificial Sequence
  Synthetic Oligonucleotide
agtccttcttccagtctaaggaccc

SEQ ID NO: 4597 - DNA, 25 bp, Artificial Sequence
  Synthetic Oligonucleotide
gcgatttatctcacgtaggtgtgga

SEQ ID NO: 4598 - DNA, 25 bp, Artificial Sequence
  Synthetic Oligonucleotide
tttcagtacctcctgtaggtaagga

SEQ ID NO: 4599 - DNA, 25 bp, Artificial Sequence
  Synthetic Oligonucleotide
attaaacgcgcgcacgacggaagga

SEQ ID NO: 4600 - DNA, 25 bp, Artificial Sequence
  Synthetic Oligonucleotide
agtcaaacgccgacgccgttgcgac

SEQ ID NO: 4601 - DNA, 25 bp, Artificial Sequence
  Synthetic Oligonucleotide
tgttagaacctcgtaccacagtgga

SEQ ID NO: 4602 - DNA, 25 bp, Artificial Sequence
  Synthetic Oligonucleotide
gattaaagtctcagaccacctgaac

SEQ ID NO: 4603 - DNA, 25 bp, Artificial Sequence
  Synthetic Oligonucleotide
tagctaagagttataccgcactcca

SEQ ID NO: 4604 - DNA, 25 bp, Artificial Sequence
  Synthetic Oligonucleotide
cgagtcacaggatcgaccccaccca

SEQ ID NO: 4605 - DNA, 25 bp, Artificial Sequence
  Synthetic Oligonucleotide
cgtctccagtgagacgttccatgga

SEQ ID NO: 4606 - DNA, 25 bp, Artificial Sequence
  Synthetic Oligonucleotide
cgtcagcatttatcttggtatagga

SEQ ID NO: 4607 - DNA, 25 bp, Artificial Sequence
  Synthetic Oligonucleotide
ctcccacggtttacagagtatccga

SEQ ID NO: 4608 - DNA, 25 bp, Artificial Sequence
  Synthetic Oligonucleotide
cccgtagtgtctcgacaataacgga

SEQ ID NO: 4609 - DNA, 25 bp, Artificial Sequence
  Synthetic Oligonucleotide
cccgtagtgtctcgacaataacgga

SEQ ID NO: 4610 - DNA, 25 bp, Artificial Sequence
  Synthetic Oligonucleotide
cccgtagtgtctcgacaataacgga

SEQ ID NO: 4611 - DNA, 25 bp, Artificial Sequence
  Synthetic Oligonucleotide
ctcttagtgttgaactaatccggac

SEQ ID NO: 4612 - DNA, 25 bp, Artificial Sequence
  Synthetic Oligonucleotide
cgtgttactgtcagcgaaattctaa

SEQ ID NO: 4613 - DNA, 25 bp, Artificial Sequence
  Synthetic Oligonucleotide
gtcatgtcgattataagcattctaa

SEQ ID NO: 4614 - DNA, 25 bp, Artificial Sequence
  Synthetic Oligonucleotide
catggacttttatcgctaactaaga

SEQ ID NO: 4615 - DNA, 25 bp, Artificial Sequence
  Synthetic Oligonucleotide
agtgtaacagtttccatagacttga

SEQ ID NO: 4616 - DNA, 25 bp, Artificial Sequence
  Synthetic Oligonucleotide
agtgtaacagtttccatagacttga

SEQ ID NO: 4617 - DNA, 25 bp, Artificial Sequence
  Synthetic Oligonucleotide
gcttactactttcctaacatgtcga

SEQ ID NO: 4618 - DNA, 25 bp, Artificial Sequence
  Synthetic Oligonucleotide
gcgtactactgtggtcgttttgcga

SEQ ID NO: 4619 - DNA, 25 bp, Artificial Sequence
  Synthetic Oligonucleotide
agcggcgtcatgtggctgttacgcc

SEQ ID NO: 4620 - DNA, 25 bp, Artificial Sequence
  Synthetic Oligonucleotide
cagggagttatttaggcttcaacag

SEQ ID NO: 4621 - DNA, 25 bp, Artificial Sequence
  Synthetic Oligonucleotide
aggagttagacgccttacacgacga

SEQ ID NO: 4622 - DNA, 25 bp, Artificial Sequence
  Synthetic Oligonucleotide
gcaagttttacgcctactagagaga

SEQ ID NO: 4623 - DNA, 25 bp, Artificial Sequence
  Synthetic Oligonucleotide
ctgcgacaggttagtcttaggtaaa

SEQ ID NO: 4624 - DNA, 25 bp, Artificial Sequence
  Synthetic Oligonucleotide
tctagaagaggttcagcagggtcaa

SEQ ID NO: 4625 - DNA, 25 bp, Artificial Sequence
  Synthetic Oligonucleotide
ctagaagaggtagagcagggtcaac

SEQ ID NO: 4626 - DNA, 25 bp, Artificial Sequence
  Synthetic Oligonucleotide
ttagaagaggtaaagcagggtcaac

SEQ ID NO: 4627 - DNA, 25 bp, Artificial Sequence
  Synthetic Oligonucleotide
tgtagagaaggtatcccagctctaa

SEQ ID NO: 4628 - DNA, 25 bp, Artificial Sequence
  Synthetic Oligonucleotide
agaataaggttaacagtacaagcaa

SEQ ID NO: 4629 - DNA, 25 bp, Artificial Sequence
  Synthetic Oligonucleotide
gtctagaagaggaacagcagggtca

SEQ ID NO: 4630 - DNA, 25 bp, Artificial Sequence
  Synthetic Oligonucleotide
gtctagaagaggaacagcagggtca

SEQ ID NO: 4631 - DNA, 25 bp, Artificial Sequence
  Synthetic Oligonucleotide
tataaagaagacacgcagaagacga

SEQ ID NO: 4632 - DNA, 25 bp, Artificial Sequence
  Synthetic Oligonucleotide
tagttgtccaacctcgcttaaacga

SEQ ID NO: 4633 - DNA, 25 bp, Artificial Sequence
  Synthetic Oligonucleotide
atcttccacacttcggtctagaaga

SEQ ID NO: 4634 - DNA, 25 bp, Artificial Sequence
  Synthetic Oligonucleotide
atcttccacacttcggtctagaaga

SEQ ID NO: 4635 - DNA, 25 bp, Artificial Sequence
  Synthetic Oligonucleotide
agatatgacaacagggttacgcaga

SEQ ID NO: 4636 - DNA, 25 bp, Artificial Sequence
  Synthetic Oligonucleotide
aagtggtacaacgggtccgaccaga

SEQ ID NO: 4637 - DNA, 25 bp, Artificial Sequence
  Synthetic Oligonucleotide
tcactagaggaaggagtatgccaga

SEQ ID NO: 4638 - DNA, 25 bp, Artificial Sequence
  Synthetic Oligonucleotide
ccctacgggaggtacaggacctaga

SEQ ID NO: 4639 - DNA, 25 bp, Artificial Sequence
  Synthetic Oligonucleotide
ccctacgggaggtacaggacctaga

SEQ ID NO: 4640 - DNA, 25 bp, Artificial Sequence
  Synthetic Oligonucleotide
accgtactagcaagaagagcaccaa

SEQ ID NO: 4641 - DNA, 25 bp, Artificial Sequence
  Synthetic Oligonucleotide
tcgtttctagtttgagacgaccaga

SEQ ID NO: 4642 - DNA, 25 bp, Artificial Sequence
  Synthetic Oligonucleotide
actgttcctcgtcttcacagtcaca

SEQ ID NO: 4643 - DNA, 25 bp, Artificial Sequence
  Synthetic Oligonucleotide
tagtcgccgttcaacgcagtcgtga

SEQ ID NO: 4644 - DNA, 25 bp, Artificial Sequence
  Synthetic Oligonucleotide
agttcgaccgaaaacggtaacgtga

SEQ ID NO: 4645 - DNA, 25 bp, Artificial Sequence
  Synthetic Oligonucleotide
gaacttcgccgggaccggtagagga

SEQ ID NO: 4646 - DNA, 25 bp, Artificial Sequence
  Synthetic Oligonucleotide
ttaaaaacccgtagccttagagaga

SEQ ID NO: 4647 - DNA, 25 bp, Artificial Sequence
  Synthetic Oligonucleotide
taacagttatcaaagccttgaaagt

SEQ ID NO: 4648 - DNA, 25 bp, Artificial Sequence
  Synthetic Oligonucleotide
caacgaggttcatattcttaaaagt

SEQ ID NO: 4649 - DNA, 25 bp, Artificial Sequence
  Synthetic Oligonucleotide
accccgggtcatttgtttttgaacg

SEQ ID NO: 4650 - DNA, 25 bp, Artificial Sequence
  Synthetic Oligonucleotide
cctgttgtaccgttgatttatggcg

SEQ ID NO: 4651 - DNA, 25 bp, Artificial Sequence
  Synthetic Oligonucleotide
actcctttagccttctttgctggag

SEQ ID NO: 4652 - DNA, 25 bp, Artificial Sequence
  Synthetic Oligonucleotide
tccactgccaataccttgacgtggg

SEQ ID NO: 4653 - DNA, 25 bp, Artificial Sequence
  Synthetic Oligonucleotide
tccgaaaccaagacgagggtttaga

SEQ ID NO: 4654 - DNA, 25 bp, Artificial Sequence
  Synthetic Oligonucleotide
tccgaaagcgggaaacaggttataa

SEQ ID NO: 4655 - DNA, 25 bp, Artificial Sequence
  Synthetic Oligonucleotide
cgtaacagcagagtacaggtttaaa

SEQ ID NO: 4656 - DNA, 25 bp, Artificial Sequence
  Synthetic Oligonucleotide
cccccgtacgaattctgagtttaaa

SEQ ID NO: 4657 - DNA, 25 bp, Artificial Sequence
  Synthetic Oligonucleotide
cgtccacggaaaggtctttgtttca

SEQ ID NO: 4658 - DNA, 25 bp, Artificial Sequence
  Synthetic Oligonucleotide
cttcaggagggagttatgttagaca

SEQ ID NO: 4659 - DNA, 25 bp, Artificial Sequence
  Synthetic Oligonucleotide
ttctcaggagggaaggagttcaaca

SEQ ID NO: 4660 - DNA, 25 bp, Artificial Sequence
  Synthetic Oligonucleotide
agtcctcgggcaaagagtcccacca

SEQ ID NO: 4661 - DNA, 25 bp, Artificial Sequence
  Synthetic Oligonucleotide
cccgcgctcaacaatcgaccgacca

SEQ ID NO: 4662 - DNA, 25 bp, Artificial Sequence
  Synthetic Oligonucleotide
acacccgctcgtcgaacaccggcaa

SEQ ID NO: 4663 - DNA, 25 bp, Artificial Sequence
  Synthetic Oligonucleotide
aaccccttcaggaccgggtcgaact

SEQ ID NO: 4664 - DNA, 25 bp, Artificial Sequence
  Synthetic Oligonucleotide
agcactctgtcatgccagggataga

SEQ ID NO: 4665 - DNA, 25 bp, Artificial Sequence
  Synthetic Oligonucleotide
aactgtcactgatacccggggaaga

SEQ ID NO: 4666 - DNA, 25 bp, Artificial Sequence
  Synthetic Oligonucleotide
tgccagaacgtgtcgacgggataga

SEQ ID NO: 4667 - DNA, 25 bp, Artificial Sequence
  Synthetic Oligonucleotide
ggcagtccgtcgtgtatcgagaaga

SEQ ID NO: 4668 - DNA, 25 bp, Artificial Sequence
  Synthetic Oligonucleotide
cggccagtcccactagtcggagaga

SEQ ID NO: 4669 - DNA, 25 bp, Artificial Sequence
  Synthetic Oligonucleotide
accggtccccaccattcgtcaacca

SEQ ID NO: 4670 - DNA, 25 bp, Artificial Sequence
  Synthetic Oligonucleotide
ggtcggtctcccaaatttccacaca

SEQ ID NO: 4671 - DNA, 25 bp, Artificial Sequence
  Synthetic Oligonucleotide
ggggcagcgcattaattcagcagac

SEQ ID NO: 4672 - DNA, 25 bp, Artificial Sequence
  Synthetic Oligonucleotide
gcgtcagacgcttgcagtgcaggaa

SEQ ID NO: 4673 - DNA, 25 bp, Artificial Sequence
  Synthetic Oligonucleotide
acgaagtgatggtagaactacagca

SEQ ID NO: 4674 - DNA, 25 bp, Artificial Sequence
  Synthetic Oligonucleotide
cagaaaaagtcttagaccccgtcga

SEQ ID NO: 4675 - DNA, 25 bp, Artificial Sequence
  Synthetic Oligonucleotide
ccaatataagacctaatgcccgtac

SEQ ID NO: 4676 - DNA, 25 bp, Artificial Sequence
  Synthetic Oligonucleotide
accagtatataactcgcactgcaaa

SEQ ID NO: 4677 - DNA, 25 bp, Artificial Sequence
  Synthetic Oligonucleotide
accatttcaatgtatgcgtctacga

SEQ ID NO: 4678 - DNA, 25 bp, Artificial Sequence
  Synthetic Oligonucleotide
tccatggtctaatgtttaaactcga

SEQ ID NO: 4679 - DNA, 25 bp, Artificial Sequence
  Synthetic Oligonucleotide
ctattggttagtcatagaaacctcc

SEQ ID NO: 4680 - DNA, 25 bp, Artificial Sequence
  Synthetic Oligonucleotide
aacttgtgacttcatgacaccccat

SEQ ID NO: 4681 - DNA, 25 bp, Artificial Sequence
  Synthetic Oligonucleotide
ctaggtgttgacaatgtaaccccca

SEQ ID NO: 4682 - DNA, 25 bp, Artificial Sequence
  Synthetic Oligonucleotide
gtgtgaacatcatcgtgaccgccca

SEQ ID NO: 4683 - DNA, 20 bp, Artificial Sequence
  Synthetic Oligonucleotide
cagttctacgatggcaagtc

SEQ ID NO: 4684 - DNA, 18 bp, Artificial Sequence
  Synthetic Oligonucleotide
agttctacgatggcaagt

SEQ ID NO: 4685 - DNA, 25 bp, Artificial Sequence
  Synthetic Oligonucleotide
gagccggagggtttcacgaccctaa

SEQ ID NO: 4686 - DNA, 25 bp, Artificial Sequence
  Synthetic Oligonucleotide
aactggtaagtattcgacatcctaa

SEQ ID NO: 4687 - DNA, 25 bp, Artificial Sequence
  Synthetic Oligonucleotide
cgaatctgtcgatcctccaaccgaa

SEQ ID NO: 4688 - DNA, 25 bp, Artificial Sequence
  Synthetic Oligonucleotide
taggttgtgaaccacttaagacgaa

SEQ ID NO: 4689 - DNA, 25 bp, Artificial Sequence
  Synthetic Oligonucleotide
aggtgaaaacggtcgtaaacgtaca

SEQ ID NO: 4690 - DNA, 25 bp, Artificial Sequence
  Synthetic Oligonucleotide
cgagaaaacttcttagtcgacgtca

SEQ ID NO: 4691 - DNA, 25 bp, Artificial Sequence
  Synthetic Oligonucleotide
gtacgatgaaaccttataacgacca

SEQ ID NO: 4692 - DNA, 25 bp, Artificial Sequence
  Synthetic Oligonucleotide
cggacttgcagccttgcgtaacgca

SEQ ID NO: 4693 - DNA, 25 bp, Artificial Sequence
  Synthetic Oligonucleotide
aagactgcaagtctgagacttgcga

SEQ ID NO: 4694 - DNA, 25 bp, Artificial Sequence
  Synthetic Oligonucleotide
gagacttgcgatttcaactggtcga

SEQ ID NO: 4695 - DNA, 25 bp, Artificial Sequence
  Synthetic Oligonucleotide
gaacgatccgttcgcgagatggtga

SEQ ID NO: 4696 - DNA, 25 bp, Artificial Sequence
  Synthetic Oligonucleotide
cggatctttttcacagtatcggtaa

SEQ ID NO: 4697 - DNA, 25 bp, Artificial Sequence
  Synthetic Oligonucleotide
cctgttgtttgtggtaaggtccgaa

SEQ ID NO: 4698 - DNA, 25 bp, Artificial Sequence
  Synthetic Oligonucleotide
cgagtccgaattctctatgtccgaa

SEQ ID NO: 4699 - DNA, 25 bp, Artificial Sequence
  Synthetic Oligonucleotide
gacgccgaaccgactcaagcgcgaa

SEQ ID NO: 4700 - DNA, 25 bp, Artificial Sequence
  Synthetic Oligonucleotide
acgactcgtccaccttcaagagcaa

SEQ ID NO: 4701 - DNA, 25 bp, Artificial Sequence
  Synthetic Oligonucleotide
gctcctaccagtcgtcgaagagcaa

SEQ ID NO: 4702 - DNA, 25 bp, Artificial Sequence
  Synthetic Oligonucleotide
tctcaatccttggtcagacgaggaa

SEQ ID NO: 4703 - DNA, 25 bp, Artificial Sequence
  Synthetic Oligonucleotide
ttcaagttcgttgtagcacaagagc

SEQ ID NO: 4704 - DNA, 17 bp, Artificial Sequence
  Synthetic Oligonucleotide
cagttctacgatggcaa

SEQ ID NO: 4705 - DNA, 17 bp, Artificial Sequence
  Synthetic Oligonucleotide
ttgccatcgtagaactg

SEQ ID NO: 4706 - DNA, 17 bp, Artificial Sequence
  Synthetic Oligonucleotide
cagttctacgatggcaa

SEQ ID NO: 4707 - DNA, 17 bp, Artificial Sequence
  Synthetic Oligonucleotide
ttgccatcgtagaactg

SEQ ID NO: 4708 - DNA, 17 bp, Artificial Sequence
  Synthetic Oligonucleotide
agttctacgatggcaag

SEQ ID NO: 4709 - DNA, 17 bp, Artificial Sequence
  Synthetic Oligonucleotide
cttgccatcgtagaact

SEQ ID NO: 4710 - DNA, 17 bp, Artificial Sequence
  Synthetic Oligonucleotide
agttctacgatggcaag

SEQ ID NO: 4711 - DNA, 17 bp, Artificial Sequence
  Synthetic Oligonucleotide
cttgccatcgtagaact

SEQ ID NO: 4712 - DNA, 17 bp, Artificial Sequence
  Synthetic Oligonucleotide
gttctacgatggcaagt

SEQ ID NO: 4713 - DNA, 17 bp, Artificial Sequence
  Synthetic Oligonucleotide
acttgccatcgtagaac

SEQ ID NO: 4714 - DNA, 17 bp, Artificial Sequence
  Synthetic Oligonucleotide
gttctacgatggcaagt

SEQ ID NO: 4715 - DNA, 17 bp, Artificial Sequence
  Synthetic Oligonucleotide
acttgccatcgtagaac

SEQ ID NO: 4716 - DNA, 17 bp, Artificial Sequence
  Synthetic Oligonucleotide
ttctacgatggcaagtc

SEQ ID NO: 4717 - DNA, 17 bp, Artificial Sequence
  Synthetic Oligonucleotide
gacttgccatcgtagaa

SEQ ID NO: 4718 - DNA, 17 bp, Artificial Sequence
  Synthetic Oligonucleotide
ttctacgatggcaagtc

SEQ ID NO: 4719 - DNA, 17 bp, Artificial Sequence
  Synthetic Oligonucleotide
gacttgccatcgtagaa

SEQ ID NO: 4720 - DNA, 25 bp, Artificial Sequence
  Synthetic Oligonucleotide
ggtcgcatttaaccttgctgcactc

SEQ ID NO: 4721 - DNA, 25 bp, Artificial Sequence
  Synthetic Oligonucleotide
gtccatcgttatccataatgtcaga

SEQ ID NO: 4722 - DNA, 25 bp, Artificial Sequence
  Synthetic Oligonucleotide
gtgcaagagctaccatagcctccga

SEQ ID NO: 4723 - DNA, 25 bp, Artificial Sequence
  Synthetic Oligonucleotide
ctgtaaaagctaccacagcctccga

SEQ ID NO: 4724 - DNA, 25 bp, Artificial Sequence
  Synthetic Oligonucleotide
ctgtaaaagctaccacagcctccga

SEQ ID NO: 4725 - DNA, 25 bp, Artificial Sequence
  Synthetic Oligonucleotide
tgcaacagttaccacagcctcgaga

SEQ ID NO: 4726 - DNA, 25 bp, Artificial Sequence
  Synthetic Oligonucleotide
tgtaacagttaccatagacttgaga

SEQ ID NO: 4727 - DNA, 25 bp, Artificial Sequence
  Synthetic Oligonucleotide
cgggtaacagtttctttacgtttaa

SEQ ID NO: 4728 - DNA, 25 bp, Artificial Sequence
  Synthetic Oligonucleotide
gaggtcacgacgacccttattacaa

SEQ ID NO: 4729 - DNA, 25 bp, Artificial Sequence
  Synthetic Oligonucleotide
cgctgcacgacgtcccttcaggaga

SEQ ID NO: 4730 - DNA, 25 bp, Artificial Sequence
  Synthetic Oligonucleotide
ccgtagccgtatacctttgaggaag

SEQ ID NO: 4731 - DNA, 25 bp, Artificial Sequence
  Synthetic Oligonucleotide
cggccgagtcctatgtcggcgtaag

SEQ ID NO: 4732 - DNA, 25 bp, Artificial Sequence
  Synthetic Oligonucleotide
gtgggaagttcactcgacgtcggaa

SEQ ID NO: 4733 - DNA, 25 bp, Artificial Sequence
  Synthetic Oligonucleotide
actgggtatggctggtactatggaa

SEQ ID NO: 4734 - DNA, 25 bp, Artificial Sequence
  Synthetic Oligonucleotide
ctacgagaatggaggtcacggcaga

SEQ ID NO: 4735 - DNA, 25 bp, Artificial Sequence
  Synthetic Oligonucleotide
cagtgcttgtgcaaccagtaccaga

SEQ ID NO: 4736 - DNA, 25 bp, Artificial Sequence
  Synthetic Oligonucleotide
gctactagaactagaagtaccacga

SEQ ID NO: 4737 - DNA, 25 bp, Artificial Sequence
  Synthetic Oligonucleotide
ttacgcaaggctgcaagtccgacga

SEQ ID NO: 4738 - DNA, 25 bp, Artificial Sequence
  Synthetic Oligonucleotide
ttgcgtaacgcaagtgcagcaacga

SEQ ID NO: 4739 - DNA, 25 bp, Artificial Sequence
  Synthetic Oligonucleotide
tcttcgaagacaacaaagtcaacga

SEQ ID NO: 4740 - DNA, 25 bp, Artificial Sequence
  Synthetic Oligonucleotide
tgtcgactagctaaaatcgcaacga

SEQ ID NO: 4741 - DNA, 25 bp, Artificial Sequence
  Synthetic Oligonucleotide
tgaccgtttctattacgaagacgac

SEQ ID NO: 4742 - DNA, 25 bp, Artificial Sequence
  Synthetic Oligonucleotide
tacgcacttcctaaagtagtagtca

SEQ ID NO: 4743 - DNA, 25 bp, Artificial Sequence
  Synthetic Oligonucleotide
ggttgacatttttctagtgagtcac

SEQ ID NO: 4744 - DNA, 25 bp, Artificial Sequence
  Synthetic Oligonucleotide
gttaacgttcttaagactttgtaca

SEQ ID NO: 4745 - DNA, 25 bp, Artificial Sequence
  Synthetic Oligonucleotide
acgtcctacgtaacgactgttagaa

SEQ ID NO: 4746 - DNA, 25 bp, Artificial Sequence
  Synthetic Oligonucleotide
actggcttaacggactagtgagtaa

SEQ ID NO: 4747 - DNA, 25 bp, Artificial Sequence
  Synthetic Oligonucleotide
cagtaagctataaacctagtgtaaa

SEQ ID NO: 4748 - DNA, 25 bp, Artificial Sequence
  Synthetic Oligonucleotide
acagccgttacggtcccatgtacca

SEQ ID NO: 4749 - DNA, 25 bp, Artificial Sequence
  Synthetic Oligonucleotide
acagtcgttacggacccatgtacca

SEQ ID NO: 4750 - DNA, 25 bp, Artificial Sequence
  Synthetic Oligonucleotide
cgagtcgctagagccatgcgtccat

SEQ ID NO: 4751 - DNA, 25 bp, Artificial Sequence
  Synthetic Oligonucleotide
agctggagcgctagcccaacgtcca

SEQ ID NO: 4752 - DNA, 25 bp, Artificial Sequence
  Synthetic Oligonucleotide
aagtgagacctttcatcaacgacca

SEQ ID NO: 4753 - DNA, 25 bp, Artificial Sequence
  Synthetic Oligonucleotide
gcgaggaccttctaccactacccga

SEQ ID NO: 4754 - DNA, 25 bp, Artificial Sequence
  Synthetic Oligonucleotide
tcgagaaccgttatgcactgtagca

SEQ ID NO: 4755 - DNA, 25 bp, Artificial Sequence
  Synthetic Oligonucleotide
aacagaacctagaaccgaaagtgca

SEQ ID NO: 4756 - DNA, 25 bp, Artificial Sequence
  Synthetic Oligonucleotide
tactctaaccggaaggaatgtgtca

SEQ ID NO: 4757 - DNA, 25 bp, Artificial Sequence
  Synthetic Oligonucleotide
tactctatccgcgagagaaagccac

SEQ ID NO: 4758 - DNA, 25 bp, Artificial Sequence
  Synthetic Oligonucleotide
taccttctacctcggtttcgccact

SEQ ID NO: 4759 - DNA, 25 bp, Artificial Sequence
  Synthetic Oligonucleotide
gtcctttactcgaactgtttcacca

SEQ ID NO: 4760 - DNA, 25 bp, Artificial Sequence
  Synthetic Oligonucleotide
catgttacgcggctgttaacaactc

SEQ ID NO: 4761 - DNA, 25 bp, Artificial Sequence
  Synthetic Oligonucleotide
ttgataccagtcctatagcaactac

SEQ ID NO: 4762 - DNA, 25 bp, Artificial Sequence
  Synthetic Oligonucleotide
ttttagtcagttctataggtgtaca

SEQ ID NO: 4763 - DNA, 25 bp, Artificial Sequence
  Synthetic Oligonucleotide
catcagtcggtttcaagacggtaga

SEQ ID NO: 4764 - DNA, 25 bp, Artificial Sequence
  Synthetic Oligonucleotide
cccgctacatcctttcgaagaggaa

SEQ ID NO: 4765 - DNA, 25 bp, Artificial Sequence
  Synthetic Oligonucleotide
ctactacatccttgtaggagacaaa

SEQ ID NO: 4766 - DNA, 25 bp, Artificial Sequence
  Synthetic Oligonucleotide
gacttacatgctttagtcacggaaa

SEQ ID NO: 4767 - DNA, 25 bp, Artificial Sequence
  Synthetic Oligonucleotide
tgctgtcgcccgtgtacctggacaa

SEQ ID NO: 4768 - DNA, 25 bp, Artificial Sequence
  Synthetic Oligonucleotide
gatagaggctcgaactaatcggaaa

SEQ ID NO: 4769 - DNA, 25 bp, Artificial Sequence
  Synthetic Oligonucleotide
gtaactaccgctgttataggtgaaa

SEQ ID NO: 4770 - DNA, 25 bp, Artificial Sequence
  Synthetic Oligonucleotide
ttagatcccgttgtatacgttcaaa

SEQ ID NO: 4771 - DNA, 25 bp, Artificial Sequence
  Synthetic Oligonucleotide
ttggtgttccatgacttagttgcaa

SEQ ID NO: 4772 - DNA, 25 bp, Artificial Sequence
  Synthetic Oligonucleotide
cagagtatccgaaacttggttcaca

SEQ ID NO: 4773 - DNA, 25 bp, Artificial Sequence
  Synthetic Oligonucleotide
agacggtcacggacgtttgtcaaga

SEQ ID NO: 4774 - DNA, 25 bp, Artificial Sequence
  Synthetic Oligonucleotide
taaaaggccacgtcgaaagtcaaga

SEQ ID NO: 4775 - DNA, 25 bp, Artificial Sequence
  Synthetic Oligonucleotide
caattagaaccctctattgtcaagg

SEQ ID NO: 4776 - DNA, 25 bp, Artificial Sequence
  Synthetic Oligonucleotide
gacaactaggcctccctatggaagg

SEQ ID NO: 4777 - DNA, 25 bp, Artificial Sequence
  Synthetic Oligonucleotide
gacgactaggccaccctatgggaga

SEQ ID NO: 4778 - DNA, 25 bp, Artificial Sequence
  Synthetic Oligonucleotide
ccacaggccccagtagtcgcggaca

SEQ ID NO: 4779 - DNA, 25 bp, Artificial Sequence
  Synthetic Oligonucleotide
tctcagagcaagcaatagccttaat

SEQ ID NO: 4780 - DNA, 25 bp, Artificial Sequence
  Synthetic Oligonucleotide
cttcgaagacaacaaagtcaacgaa

SEQ ID NO: 4781 - DNA, 25 bp, Artificial Sequence
  Synthetic Oligonucleotide
ctaccagaaaggtcattctcagaac

SEQ ID NO: 4782 - DNA, 25 bp, Artificial Sequence
  Synthetic Oligonucleotide
ctaacagaagggtcagtttcagaag

SEQ ID NO: 4783 - DNA, 25 bp, Artificial Sequence
  Synthetic Oligonucleotide
caagaagaaggaagagcgctcaaag

SEQ ID NO: 4784 - DNA, 25 bp, Artificial Sequence
  Synthetic Oligonucleotide
cttacgggaggaacaggacctagaa

SEQ ID NO: 4785 - DNA, 25 bp, Artificial Sequence
  Synthetic Oligonucleotide
cttcgctccgaagagagccgcgaca

SEQ ID NO: 4786 - DNA, 25 bp, Artificial Sequence
  Synthetic Oligonucleotide
gtgacctctgagccaaggacggtca

SEQ ID NO: 4787 - DNA, 25 bp, Artificial Sequence
  Synthetic Oligonucleotide
acttcctcgggtccaccggggtcga

SEQ ID NO: 4788 - DNA, 25 bp, Artificial Sequence
  Synthetic Oligonucleotide
ctacatctcgggtcacaggtgccga

SEQ ID NO: 4789 - DNA, 25 bp, Artificial Sequence
  Synthetic Oligonucleotide
ccttagcttgggactaaggggcagt

SEQ ID NO: 4790 - DNA, 25 bp, Artificial Sequence
  Synthetic Oligonucleotide
ctcatcttgggtcctaatggcgcgg

SEQ ID NO: 4791 - DNA, 25 bp, Artificial Sequence
  Synthetic Oligonucleotide
ccacccaggactacttgtggcaggt

SEQ ID NO: 4792 - DNA, 25 bp, Artificial Sequence
  Synthetic Oligonucleotide
cctcctgccgctattgtcgaggaga

SEQ ID NO: 4793 - DNA, 25 bp, Artificial Sequence
  Synthetic Oligonucleotide
atccagcgcatcatcgccgggacga

SEQ ID NO: 4794 - DNA, 25 bp, Artificial Sequence
  Synthetic Oligonucleotide
tcctacttcaactcgcggtgcacga

SEQ ID NO: 4795 - DNA, 25 bp, Artificial Sequence
  Synthetic Oligonucleotide
agtccatgcccaagtagtctgcaac

SEQ ID NO: 4796 - DNA, 25 bp, Artificial Sequence
  Synthetic Oligonucleotide
gcgcaagctactactagagcggcaa

SEQ ID NO: 4797 - DNA, 25 bp, Artificial Sequence
  Synthetic Oligonucleotide
agcagtggtcgtttaggacggacaa

SEQ ID NO: 4798 - DNA, 25 bp, Artificial Sequence
  Synthetic Oligonucleotide
gtcctttagtcttagacccgtacca

SEQ ID NO: 4799 - DNA, 25 bp, Artificial Sequence
  Synthetic Oligonucleotide
gtctagtctctctagatcctctcga

SEQ ID NO: 4800 - DNA, 25 bp, Artificial Sequence
  Synthetic Oligonucleotide
aagttatctagcgtcgctccctcga

SEQ ID NO: 4801 - DNA, 25 bp, Artificial Sequence
  Synthetic Oligonucleotide
ataagttatcaaatagcttccgtgc

SEQ ID NO: 4802 - DNA, 25 bp, Artificial Sequence
  Synthetic Oligonucleotide
cagaagttgtcatagtttgaatctc

SEQ ID NO: 4803 - DNA, 25 bp, Artificial Sequence
  Synthetic Oligonucleotide
ggaaacttgtgacttgatgacaccc

SEQ ID NO: 4804 - DNA, 25 bp, Artificial Sequence
  Synthetic Oligonucleotide
agaattgtcggtctgatcgcccact

SEQ ID NO: 4805 - DNA, 25 bp, Artificial Sequence
  Synthetic Oligonucleotide
gagaattgtcggtctgatcgcccac

SEQ ID NO: 4806 - DNA, 25 bp, Artificial Sequence
  Synthetic Oligonucleotide
aaggtaatagcgtctgctccccgac

SEQ ID NO: 4807 - DNA, 18 bp, Artificial Sequence
  Synthetic Oligonucleotide
agttctacgatggcaagt

SEQ ID NO: 4808 - DNA, 16 bp, Artificial Sequence
  Synthetic Oligonucleotide
gttctacgatggcaag

SEQ ID NO: 4809 - DNA, 25 bp, Artificial Sequence
  Synthetic Oligonucleotide
gagccggagggtatcacgaccctaa

SEQ ID NO: 4810 - DNA, 25 bp, Artificial Sequence
  Synthetic Oligonucleotide
aactggtaagtaatcgacatcctaa

SEQ ID NO: 4811 - DNA, 25 bp, Artificial Sequence
  Synthetic Oligonucleotide
cgaatctgtcgaacctccaaccgaa

SEQ ID NO: 4812 - DNA, 25 bp, Artificial Sequence
  Synthetic Oligonucleotide
taggttgtgaacgacttaagacgaa

SEQ ID NO: 4813 - DNA, 25 bp, Artificial Sequence
  Synthetic Oligonucleotide
aggtgaaaacggacgtaaacgtaca

SEQ ID NO: 4814 - DNA, 25 bp, Artificial Sequence
  Synthetic Oligonucleotide
cgagaaaacttcatagtcgacgtca

SEQ ID NO: 4815 - DNA, 25 bp, Artificial Sequence
  Synthetic Oligonucleotide
gtacgatgaaacgttataacgacca

SEQ ID NO: 4816 - DNA, 25 bp, Artificial Sequence
  Synthetic Oligonucleotide
cggacttgcagcgttgcgtaacgca

SEQ ID NO: 4817 - DNA, 25 bp, Artificial Sequence
  Synthetic Oligonucleotide
aagactgcaagtgtgagacttgcga

SEQ ID NO: 4818 - DNA, 25 bp, Artificial Sequence
  Synthetic Oligonucleotide
gagacttgcgatatcaactggtcga

SEQ ID NO: 4819 - DNA, 25 bp, Artificial Sequence
  Synthetic Oligonucleotide
gaacgatccgttggcgagatggtga

SEQ ID NO: 4820 - DNA, 25 bp, Artificial Sequence
  Synthetic Oligonucleotide
cggatctttttctcagtatcggtaa

SEQ ID NO: 4821 - DNA, 25 bp, Artificial Sequence
  Synthetic Oligonucleotide
cctgttgtttgtcgtaaggtccgaa

SEQ ID NO: 4822 - DNA, 25 bp, Artificial Sequence
  Synthetic Oligonucleotide
cgagtccgaattgtctatgtccgaa

SEQ ID NO: 4823 - DNA, 25 bp, Artificial Sequence
  Synthetic Oligonucleotide
gacgccgaaccgtctcaagcgcgaa

SEQ ID NO: 4824 - DNA, 25 bp, Artificial Sequence
  Synthetic Oligonucleotide
acgactcgtccagcttcaagagcaa

SEQ ID NO: 4825 - DNA, 25 bp, Artificial Sequence
  Synthetic Oligonucleotide
gctcctaccagtggtcgaagagcaa

SEQ ID NO: 4826 - DNA, 25 bp, Artificial Sequence
  Synthetic Oligonucleotide
tctcaatccttgctcagacgaggaa

SEQ ID NO: 4827 - DNA, 25 bp, Artificial Sequence
  Synthetic Oligonucleotide
ttcaagttcgttctagcacaagagc

SEQ ID NO: 4828 - DNA, 17 bp, Artificial Sequence
  Synthetic Oligonucleotide
ttgccatcgtagaactg

SEQ ID NO: 4829 - DNA, 17 bp, Artificial Sequence
  Synthetic Oligonucleotide
cagttctacgatggcaa

SEQ ID NO: 4830 - DNA, 17 bp, Artificial Sequence
  Synthetic Oligonucleotide
ttgccatcgtagaactg

SEQ ID NO: 4831 - DNA, 17 bp, Artificial Sequence
  Synthetic Oligonucleotide
cagttctacgatggcaa

SEQ ID NO: 4832 - DNA, 17 bp, Artificial Sequence
  Synthetic Oligonucleotide
cttgccatcgtagaact

SEQ ID NO: 4833 - DNA, 17 bp, Artificial Sequence
  Synthetic Oligonucleotide
agttctacgatggcaag

SEQ ID NO: 4834 - DNA, 17 bp, Artificial Sequence
  Synthetic Oligonucleotide
cttgccatcgtagaact

SEQ ID NO: 4835 - DNA, 17 bp, Artificial Sequence
  Synthetic Oligonucleotide
agttctacgatggcaag

SEQ ID NO: 4836 - DNA, 17 bp, Artificial Sequence
  Synthetic Oligonucleotide
acttgccatcgtagaac

SEQ ID NO: 4837 - DNA, 17 bp, Artificial Sequence
  Synthetic Oligonucleotide
gttctacgatggcaagt

SEQ ID NO: 4838 - DNA, 17 bp, Artificial Sequence
  Synthetic Oligonucleotide
acttgccatcgtagaac

SEQ ID NO: 4839 - DNA, 17 bp, Artificial Sequence
  Synthetic Oligonucleotide
gttctacgatggcaagt

SEQ ID NO: 4840 - DNA, 17 bp, Artificial Sequence
  Synthetic Oligonucleotide
gacttgccatcgtagaa

SEQ ID NO: 4841 - DNA, 17 bp, Artificial Sequence
  Synthetic Oligonucleotide
ttctacgatggcaagtc

SEQ ID NO: 4842 - DNA, 17 bp, Artificial Sequence
  Synthetic Oligonucleotide
gacttgccatcgtagaa

SEQ ID NO: 4843 - DNA, 17 bp, Artificial Sequence
  Synthetic Oligonucleotide
ttctacgatggcaagtc

SEQ ID NO: 4844 - DNA, 25 bp, Artificial Sequence
  Synthetic Oligonucleotide
ggtcgcatttaagcttgctgcactc

SEQ ID NO: 4845 - DNA, 25 bp, Artificial Sequence
  Synthetic Oligonucleotide
gtccatcgttatgcataatgtcaga

SEQ ID NO: 4846 - DNA, 25 bp, Artificial Sequence
  Synthetic Oligonucleotide
gtgcaagagctagcatagcctccga

SEQ ID NO: 4847 - DNA, 25 bp, Artificial Sequence
  Synthetic Oligonucleotide
ctgtaaaagctagcacagcctccga

SEQ ID NO: 4848 - DNA, 25 bp, Artificial Sequence
  Synthetic Oligonucleotide
ctgtaaaagctagcacagcctccga

SEQ ID NO: 4849 - DNA, 25 bp, Artificial Sequence
  Synthetic Oligonucleotide
tgcaacagttacgacagcctcgaga

SEQ ID NO: 4850 - DNA, 25 bp, Artificial Sequence
  Synthetic Oligonucleotide
tgtaacagttacgatagacttgaga

SEQ ID NO: 4851 - DNA, 25 bp, Artificial Sequence
  Synthetic Oligonucleotide
cgggtaacagttactttacgtttaa

SEQ ID NO: 4852 - DNA, 25 bp, Artificial Sequence
  Synthetic Oligonucleotide
gaggtcacgacgtcccttattacaa

SEQ ID NO: 4853 - DNA, 25 bp, Artificial Sequence
  Synthetic Oligonucleotide
cgctgcacgacgacccttcaggaga

SEQ ID NO: 4854 - DNA, 25 bp, Artificial Sequence
  Synthetic Oligonucleotide
ccgtagccgtattcctttgaggaag

SEQ ID NO: 4855 - DNA, 25 bp, Artificial Sequence
  Synthetic Oligonucleotide
cggccgagtcctttgtcggcgtaag

SEQ ID NO: 4856 - DNA, 25 bp, Artificial Sequence
  Synthetic Oligonucleotide
gtgggaagttcagtcgacgtcggaa

SEQ ID NO: 4857 - DNA, 25 bp, Artificial Sequence
  Synthetic Oligonucleotide
actgggtatggcaggtactatggaa

SEQ ID NO: 4858 - DNA, 25 bp, Artificial Sequence
  Synthetic Oligonucleotide
ctacgagaatggtggtcacggcaga

SEQ ID NO: 4859 - DNA, 25 bp, Artificial Sequence
  Synthetic Oligonucleotide
cagtgcttgtgctaccagtaccaga

SEQ ID NO: 4860 - DNA, 25 bp, Artificial Sequence
  Synthetic Oligonucleotide
gctactagaacttgaagtaccacga

SEQ ID NO: 4861 - DNA, 25 bp, Artificial Sequence
  Synthetic Oligonucleotide
ttacgcaaggctccaagtccgacga

SEQ ID NO: 4862 - DNA, 25 bp, Artificial Sequence
  Synthetic Oligonucleotide
ttgcgtaacgcatgtgcagcaacga

SEQ ID NO: 4863 - DNA, 25 bp, Artificial Sequence
  Synthetic Oligonucleotide
tcttcgaagacatcaaagtcaacga

SEQ ID NO: 4864 - DNA, 25 bp, Artificial Sequence
  Synthetic Oligonucleotide
tgtcgactagcttaaatcgcaacga

SEQ ID NO: 4865 - DNA, 25 bp, Artificial Sequence
  Synthetic Oligonucleotide
tgaccgtttctaatacgaagacgac

SEQ ID NO: 4866 - DNA, 25 bp, Artificial Sequence
  Synthetic Oligonucleotide
tacgcacttccttaagtagtagtca

SEQ ID NO: 4867 - DNA, 25 bp, Artificial Sequence
  Synthetic Oligonucleotide
ggttgacattttactagtgagtcac

SEQ ID NO: 4868 - DNA, 25 bp, Artificial Sequence
  Synthetic Oligonucleotide
gttaacgttctttagactttgtaca

SEQ ID NO: 4869 - DNA, 25 bp, Artificial Sequence
  Synthetic Oligonucleotide
acgtcctacgtatcgactgttagaa

SEQ ID NO: 4870 - DNA, 25 bp, Artificial Sequence
  Synthetic Oligonucleotide
actggcttaacgcactagtgagtaa

SEQ ID NO: 4871 - DNA, 25 bp, Artificial Sequence
  Synthetic Oligonucleotide
cagtaagctatatacctagtgtaaa

SEQ ID NO: 4872 - DNA, 25 bp, Artificial Sequence
  Synthetic Oligonucleotide
acagccgttacgctcccatgtacca

SEQ ID NO: 4873 - DNA, 25 bp, Artificial Sequence
  Synthetic Oligonucleotide
acagtcgttacgcacccatgtacca

SEQ ID NO: 4874 - DNA, 25 bp, Artificial Sequence
  Synthetic Oligonucleotide
cgagtcgctagacccatgcgtccat

SEQ ID NO: 4875 - DNA, 25 bp, Artificial Sequence
  Synthetic Oligonucleotide
agctggagcgcttgcccaacgtcca

SEQ ID NO: 4876 - DNA, 25 bp, Artificial Sequence
  Synthetic Oligonucleotide
aagtgagaccttacatcaacgacca

SEQ ID NO: 4877 - DNA, 25 bp, Artificial Sequence
  Synthetic Oligonucleotide
gcgaggaccttcaaccactacccga

SEQ ID NO: 4878 - DNA, 25 bp, Artificial Sequence
  Synthetic Oligonucleotide
tcgagaaccgttttgcactgtagca

SEQ ID NO: 4879 - DNA, 25 bp, Artificial Sequence
  Synthetic Oligonucleotide
aacagaacctagtaccgaaagtgca

SEQ ID NO: 4880 - DNA, 25 bp, Artificial Sequence
  Synthetic Oligonucleotide
tactctaaccggtaggaatgtgtca

SEQ ID NO: 4881 - DNA, 25 bp, Artificial Sequence
  Synthetic Oligonucleotide
tactctatccgccagagaaagccac

SEQ ID NO: 4882 - DNA, 25 bp, Artificial Sequence
  Synthetic Oligonucleotide
taccttctacctgggtttcgccact

SEQ ID NO: 4883 - DNA, 25 bp, Artificial Sequence
  Synthetic Oligonucleotide
gtcctttactcgtactgtttcacca

SEQ ID NO: 4884 - DNA, 25 bp, Artificial Sequence
  Synthetic Oligonucleotide
catgttacgcgggtgttaacaactc

SEQ ID NO: 4885 - DNA, 25 bp, Artificial Sequence
  Synthetic Oligonucleotide
ttgataccagtcgtatagcaactac

SEQ ID NO: 4886 - DNA, 25 bp, Artificial Sequence
  Synthetic Oligonucleotide
ttttagtcagttgtataggtgtaca

SEQ ID NO: 4887 - DNA, 25 bp, Artificial Sequence
  Synthetic Oligonucleotide
catcagtcggttacaagacggtaga

SEQ ID NO: 4888 - DNA, 25 bp, Artificial Sequence
  Synthetic Oligonucleotide
cccgctacatccattcgaagaggaa

SEQ ID NO: 4889 - DNA, 25 bp, Artificial Sequence
  Synthetic Oligonucleotide
ctactacatcctagtaggagacaaa

SEQ ID NO: 4890 - DNA, 25 bp, Artificial Sequence
  Synthetic Oligonucleotide
gacttacatgctatagtcacggaaa

SEQ ID NO: 4891 - DNA, 25 bp, Artificial Sequence
  Synthetic Oligonucleotide
tgctgtcgcccgagtacctggacaa

SEQ ID NO: 4892 - DNA, 25 bp, Artificial Sequence
  Synthetic Oligonucleotide
gatagaggctcgtactaatcggaaa

SEQ ID NO: 4893 - DNA, 25 bp, Artificial Sequence
  Synthetic Oligonucleotide
gtaactaccgctcttataggtgaaa

SEQ ID NO: 4894 - DNA, 25 bp, Artificial Sequence
  Synthetic Oligonucleotide
ttagatcccgttctatacgttcaaa

SEQ ID NO: 4895 - DNA, 25 bp, Artificial Sequence
  Synthetic Oligonucleotide
ttggtgttccatcacttagttgcaa

SEQ ID NO: 4896 - DNA, 25 bp, Artificial Sequence
  Synthetic Oligonucleotide
cagagtatccgatacttggttcaca

SEQ ID NO: 4897 - DNA, 25 bp, Artificial Sequence
  Synthetic Oligonucleotide
agacggtcacggtcgtttgtcaaga

SEQ ID NO: 4898 - DNA, 25 bp, Artificial Sequence
  Synthetic Oligonucleotide
taaaaggccacgacgaaagtcaaga

SEQ ID NO: 4899 - DNA, 25 bp, Artificial Sequence
  Synthetic Oligonucleotide
caattagaacccactattgtcaagg

SEQ ID NO: 4900 - DNA, 25 bp, Artificial Sequence
  Synthetic Oligonucleotide
gacaactaggccaccctatggaagg

SEQ ID NO: 4901 - DNA, 25 bp, Artificial Sequence
  Synthetic Oligonucleotide
gacgactaggcctccctatgggaga

SEQ ID NO: 4902 - DNA, 25 bp, Artificial Sequence
  Synthetic Oligonucleotide
ccacaggccccactagtcgcggaca

SEQ ID NO: 4903 - DNA, 25 bp, Artificial Sequence
  Synthetic Oligonucleotide
tctcagagcaaggaatagccttaat

SEQ ID NO: 4904 - DNA, 25 bp, Artificial Sequence
  Synthetic Oligonucleotide
cttcgaagacaagaaagtcaacgaa

SEQ ID NO: 4905 - DNA, 25 bp, Artificial Sequence
  Synthetic Oligonucleotide
ctaccagaaaggacattctcagaac

SEQ ID NO: 4906 - DNA, 25 bp, Artificial Sequence
  Synthetic Oligonucleotide
ctaacagaagggacagtttcagaag

SEQ ID NO: 4907 - DNA, 25 bp, Artificial Sequence
  Synthetic Oligonucleotide
caagaagaaggatgagcgctcaaag

SEQ ID NO: 4908 - DNA, 25 bp, Artificial Sequence
  Synthetic Oligonucleotide
cttacgggaggatcaggacctagaa

SEQ ID NO: 4909 - DNA, 25 bp, Artificial Sequence
  Synthetic Oligonucleotide
cttcgctccgaacagagccgcgaca

SEQ ID NO: 4910 - DNA, 25 bp, Artificial Sequence
  Synthetic Oligonucleotide
gtgacctctgaggcaaggacggtca

SEQ ID NO: 4911 - DNA, 25 bp, Artificial Sequence
  Synthetic Oligonucleotide
acttcctcgggtgcaccggggtcga

SEQ ID NO: 4912 - DNA, 25 bp, Artificial Sequence
  Synthetic Oligonucleotide
ctacatctcgggacacaggtgccga

SEQ ID NO: 4913 - DNA, 25 bp, Artificial Sequence
  Synthetic Oligonucleotide
ccttagcttgggtctaaggggcagt

SEQ ID NO: 4914 - DNA, 25 bp, Artificial Sequence
  Synthetic Oligonucleotide
ctcatcttgggtgctaatggcgcgg

SEQ ID NO: 4915 - DNA, 25 bp, Artificial Sequence
  Synthetic Oligonucleotide
ccacccaggacttcttgtggcaggt

SEQ ID NO: 4916 - DNA, 25 bp, Artificial Sequence
  Synthetic Oligonucleotide
cctcctgccgcttttgtcgaggaga

SEQ ID NO: 4917 - DNA, 25 bp, Artificial Sequence
  Synthetic Oligonucleotide
atccagcgcatcttcgccgggacga

SEQ ID NO: 4918 - DNA, 25 bp, Artificial Sequence
  Synthetic Oligonucleotide
tcctacttcaacacgcggtgcacga

SEQ ID NO: 4919 - DNA, 25 bp, Artificial Sequence
  Synthetic Oligonucleotide
agtccatgcccatgtagtctgcaac

SEQ ID NO: 4920 - DNA, 25 bp, Artificial Sequence
  Synthetic Oligonucleotide
gcgcaagctacttctagagcggcaa

SEQ ID NO: 4921 - DNA, 25 bp, Artificial Sequence
  Synthetic Oligonucleotide
agcagtggtcgtataggacggacaa

SEQ ID NO: 4922 - DNA, 25 bp, Artificial Sequence
  Synthetic Oligonucleotide
gtcctttagtctaagacccgtacca

SEQ ID NO: 4923 - DNA, 25 bp, Artificial Sequence
  Synthetic Oligonucleotide
gtctagtctctcaagatcctctcga

SEQ ID NO: 4924 - DNA, 25 bp, Artificial Sequence
  Synthetic Oligonucleotide
aagttatctagcctcgctccctcga

SEQ ID NO: 4925 - DNA, 25 bp, Artificial Sequence
  Synthetic Oligonucleotide
ataagttatcaattagcttccgtgc

SEQ ID NO: 4926 - DNA, 25 bp, Artificial Sequence
  Synthetic Oligonucleotide
cagaagttgtcaaagtttgaatctc

SEQ ID NO: 4927 - DNA, 25 bp, Artificial Sequence
  Synthetic Oligonucleotide
ggaaacttgtgagttgatgacaccc

SEQ ID NO: 4928 - DNA, 25 bp, Artificial Sequence
  Synthetic Oligonucleotide
agaattgtcggtgtgatcgcccact

SEQ ID NO: 4929 - DNA, 25 bp, Artificial Sequence
  Synthetic Oligonucleotide
gagaattgtcggactgatcgcccac

SEQ ID NO: 4930 - DNA, 25 bp, Artificial Sequence
  Synthetic Oligonucleotide
aaggtaatagcgactgctccccgac

SEQ ID NO: 4931 - DNA, 16 bp, Artificial Sequence
  Synthetic Oligonucleotide
gttctacgatggcaag

SEQ ID NO: 4932 - DNA, 25 bp, Artificial Sequence
  Synthetic Oligonucleotide
ctcatcggtgcgagccactcctaga

SEQ ID NO: 4933 - DNA, 25 bp, Artificial Sequence
  Synthetic Oligonucleotide
gctgatggtagctttcaactatccc

SEQ ID NO: 4934 - DNA, 25 bp, Artificial Sequence
  Synthetic Oligonucleotide
gttatggagacagtacgaatatcca

SEQ ID NO: 4935 - DNA, 25 bp, Artificial Sequence
  Synthetic Oligonucleotide
gaggagggaaacaacaggtatcgaa

SEQ ID NO: 4936 - DNA, 25 bp, Artificial Sequence
  Synthetic Oligonucleotide
aagcggaagtgcaacagttaccaca

SEQ ID NO: 4937 - DNA, 25 bp, Artificial Sequence
  Synthetic Oligonucleotide
cgacgtaacagccacagctacccga

SEQ ID NO: 4938 - DNA, 25 bp, Artificial Sequence
  Synthetic Oligonucleotide
acatagtacccatacctacacgtca

SEQ ID NO: 4939 - DNA, 25 bp, Artificial Sequence
  Synthetic Oligonucleotide
acattacatcagtacgcatacgcga

SEQ ID NO: 4940 - DNA, 25 bp, Artificial Sequence
  Synthetic Oligonucleotide
acacagtttcctgtgacgcaaccga

SEQ ID NO: 4941 - DNA, 25 bp, Artificial Sequence
  Synthetic Oligonucleotide
ctaatgtttctgaagaacagaccga

SEQ ID NO: 4942 - DNA, 25 bp, Artificial Sequence
  Synthetic Oligonucleotide
ccgaacattttcacgtgttgaccgc

SEQ ID NO: 4943 - DNA, 25 bp, Artificial Sequence
  Synthetic Oligonucleotide
cgaaaatcttctctgtctcgctaac

SEQ ID NO: 4944 - DNA, 25 bp, Artificial Sequence
  Synthetic Oligonucleotide
aaatagctcgtccagtgggcgtaca

SEQ ID NO: 4945 - DNA, 25 bp, Artificial Sequence
  Synthetic Oligonucleotide
gactgctgtcggtacgtcgtggaca

SEQ ID NO: 4946 - DNA, 25 bp, Artificial Sequence
  Synthetic Oligonucleotide
actaggctcggcatagacgtcgaca

SEQ ID NO: 4947 - DNA, 25 bp, Artificial Sequence
  Synthetic Oligonucleotide
tgacgagaaccgacagagatcgaga

SEQ ID NO: 4948 - DNA, 25 bp, Artificial Sequence
  Synthetic Oligonucleotide
ctacacgaactatggcactaaaaga

SEQ ID NO: 4949 - DNA, 25 bp, Artificial Sequence
  Synthetic Oligonucleotide
cgcccgacgaagtcgacgaagaaga

SEQ ID NO: 4950 - DNA, 25 bp, Artificial Sequence
  Synthetic Oligonucleotide
cccacgagacggttcataaagaatc

SEQ ID NO: 4951 - DNA, 17 bp, Artificial Sequence
  Synthetic Oligonucleotide
cagttctacgatggcaa

SEQ ID NO: 4952 - DNA, 17 bp, Artificial Sequence
  Synthetic Oligonucleotide
ttgccatcgtagaactg

SEQ ID NO: 4953 - DNA, 17 bp, Artificial Sequence
  Synthetic Oligonucleotide
cagttctacgatggcaa

SEQ ID NO: 4954 - DNA, 17 bp, Artificial Sequence
  Synthetic Oligonucleotide
ttgccatcgtagaactg

SEQ ID NO: 4955 - DNA, 17 bp, Artificial Sequence
  Synthetic Oligonucleotide
agttctacgatggcaag

SEQ ID NO: 4956 - DNA, 17 bp, Artificial Sequence
  Synthetic Oligonucleotide
cttgccatcgtagaact

SEQ ID NO: 4957 - DNA, 17 bp, Artificial Sequence
  Synthetic Oligonucleotide
agttctacgatggcaag

SEQ ID NO: 4958 - DNA, 17 bp, Artificial Sequence
  Synthetic Oligonucleotide
cttgccatcgtagaact

SEQ ID NO: 4959 - DNA, 17 bp, Artificial Sequence
  Synthetic Oligonucleotide
gttctacgatggcaagt

SEQ ID NO: 4960 - DNA, 17 bp, Artificial Sequence
  Synthetic Oligonucleotide
acttgccatcgtagaac

SEQ ID NO: 4961 - DNA, 17 bp, Artificial Sequence
  Synthetic Oligonucleotide
gttctacgatggcaagt

SEQ ID NO: 4962 - DNA, 17 bp, Artificial Sequence
  Synthetic Oligonucleotide
acttgccatcgtagaac

SEQ ID NO: 4963 - DNA, 17 bp, Artificial Sequence
  Synthetic Oligonucleotide
ttctacgatggcaagtc

SEQ ID NO: 4964 - DNA, 17 bp, Artificial Sequence
  Synthetic Oligonucleotide
gacttgccatcgtagaa

SEQ ID NO: 4965 - DNA, 17 bp, Artificial Sequence
  Synthetic Oligonucleotide
ttctacgatggcaagtc

SEQ ID NO: 4966 - DNA, 17 bp, Artificial Sequence
  Synthetic Oligonucleotide
gacttgccatcgtagaa

SEQ ID NO: 4967 - DNA, 25 bp, Artificial Sequence
  Synthetic Oligonucleotide
tagaattcttggagcgctcgctaca

SEQ ID NO: 4968 - DNA, 25 bp, Artificial Sequence
  Synthetic Oligonucleotide
gaagccttcgtgcagagagcgcaga

SEQ ID NO: 4969 - DNA, 25 bp, Artificial Sequence
  Synthetic Oligonucleotide
gagtcctctcgttccagaactctaa

SEQ ID NO: 4970 - DNA, 25 bp, Artificial Sequence
  Synthetic Oligonucleotide
aactcggtcaggctcaggccgtaac

SEQ ID NO: 4971 - DNA, 25 bp, Artificial Sequence
  Synthetic Oligonucleotide
actcggtcagtcacatcgcgcgcac

SEQ ID NO: 4972 - DNA, 25 bp, Artificial Sequence
  Synthetic Oligonucleotide
tcctgatcctactcatcgtcgtgca

SEQ ID NO: 4973 - DNA, 25 bp, Artificial Sequence
  Synthetic Oligonucleotide
gctgctatctacccttctgtcgtgc

SEQ ID NO: 4974 - DNA, 25 bp, Artificial Sequence
  Synthetic Oligonucleotide
acggccgcatcccatccgtgtgcga

SEQ ID NO: 4975 - DNA, 25 bp, Artificial Sequence
  Synthetic Oligonucleotide
acggccgcgtcccatccgtgtgcga

SEQ ID NO: 4976 - DNA, 25 bp, Artificial Sequence
  Synthetic Oligonucleotide
acgtttgtcgcccactggtagtgca

SEQ ID NO: 4977 - DNA, 25 bp, Artificial Sequence
  Synthetic Oligonucleotide
acccctgtgccttccggtacggtca

SEQ ID NO: 4978 - DNA, 25 bp, Artificial Sequence
  Synthetic Oligonucleotide
atccctgtgccttccggtacggtca

SEQ ID NO: 4979 - DNA, 25 bp, Artificial Sequence
  Synthetic Oligonucleotide
gtcccatccgtgtgcgactcggtca

SEQ ID NO: 4980 - DNA, 25 bp, Artificial Sequence
  Synthetic Oligonucleotide
gtgacgcaaccgaaggcatggtcga

SEQ ID NO: 4981 - DNA, 25 bp, Artificial Sequence
  Synthetic Oligonucleotide
ccatcggcaaagagtccgagggaga

SEQ ID NO: 4982 - DNA, 25 bp, Artificial Sequence
  Synthetic Oligonucleotide
ccatcggcaaagagtccgagggaga

SEQ ID NO: 4983 - DNA, 25 bp, Artificial Sequence
  Synthetic Oligonucleotide
tccgaagagaggttcacgagggaga

SEQ ID NO: 4984 - DNA, 25 bp, Artificial Sequence
  Synthetic Oligonucleotide
cctcccagaggctgtcgcggcggaa

SEQ ID NO: 4985 - DNA, 25 bp, Artificial Sequence
  Synthetic Oligonucleotide
ctccaagaggtccagtaagctataa

SEQ ID NO: 4986 - DNA, 25 bp, Artificial Sequence
  Synthetic Oligonucleotide
accctgagaaggatccgtggattaa

SEQ ID NO: 4987 - DNA, 25 bp, Artificial Sequence
  Synthetic Oligonucleotide
ctaggaggctaggtctgtgacataa

SEQ ID NO: 4988 - DNA, 25 bp, Artificial Sequence
  Synthetic Oligonucleotide
agtaggtcgtgcttgtcgaactaca

SEQ ID NO: 4989 - DNA, 25 bp, Artificial Sequence
  Synthetic Oligonucleotide
tattagatcccgttgtatacgttca

SEQ ID NO: 4990 - DNA, 25 bp, Artificial Sequence
  Synthetic Oligonucleotide
ttcagatctcgttgtatcgtgtcga

SEQ ID NO: 4991 - DNA, 25 bp, Artificial Sequence
  Synthetic Oligonucleotide
gttcgagatctgtcatcgtacgtca

SEQ ID NO: 4992 - DNA, 25 bp, Artificial Sequence
  Synthetic Oligonucleotide
gtctacacgacctggctgtgtgtca

SEQ ID NO: 4993 - DNA, 25 bp, Artificial Sequence
  Synthetic Oligonucleotide
agtcactacacctgaacctgagtaa

SEQ ID NO: 4994 - DNA, 25 bp, Artificial Sequence
  Synthetic Oligonucleotide
atgacctacacccactacgtataaa

SEQ ID NO: 4995 - DNA, 25 bp, Artificial Sequence
  Synthetic Oligonucleotide
gtcgcactacccgacttatactaca

SEQ ID NO: 4996 - DNA, 25 bp, Artificial Sequence
  Synthetic Oligonucleotide
ccgtcactaccgtacttgtcaacag

SEQ ID NO: 4997 - DNA, 25 bp, Artificial Sequence
  Synthetic Oligonucleotide
cgaagccgtccacttattctccaca

SEQ ID NO: 4998 - DNA, 25 bp, Artificial Sequence
  Synthetic Oligonucleotide
gcagctacagcacgttgttccctca

SEQ ID NO: 4999 - DNA, 25 bp, Artificial Sequence
  Synthetic Oligonucleotide
agccagtcctagaagtactccatca

SEQ ID NO: 5000 - DNA, 25 bp, Artificial Sequence
  Synthetic Oligonucleotide
gagaccagcggtaccactccagtca

SEQ ID NO: 5001 - DNA, 25 bp, Artificial Sequence
  Synthetic Oligonucleotide
agacagcgggtccgacctcacgtca

SEQ ID NO: 5002 - DNA, 25 bp, Artificial Sequence
  Synthetic Oligonucleotide
gtctaagcagcaggacccctcttca

SEQ ID NO: 5003 - DNA, 25 bp, Artificial Sequence
  Synthetic Oligonucleotide
tcactaccagaaaggccagtttcag

SEQ ID NO: 5004 - DNA, 25 bp, Artificial Sequence
  Synthetic Oligonucleotide
tacattaacagaagggtcagtttca

SEQ ID NO: 5005 - DNA, 25 bp, Artificial Sequence
  Synthetic Oligonucleotide
tacactaacagaagggtcagtttca

SEQ ID NO: 5006 - DNA, 25 bp, Artificial Sequence
  Synthetic Oligonucleotide
aactctggagaaagagtctgttcca

SEQ ID NO: 5007 - DNA, 25 bp, Artificial Sequence
  Synthetic Oligonucleotide
gactccaggtgtcgagcgttggcca

SEQ ID NO: 5008 - DNA, 25 bp, Artificial Sequence
  Synthetic Oligonucleotide
aacttcaagagcagccgtttggaca

SEQ ID NO: 5009 - DNA, 25 bp, Artificial Sequence
  Synthetic Oligonucleotide
tgttcgacgcggtcgtcttggacga

SEQ ID NO: 5010 - DNA, 25 bp, Artificial Sequence
  Synthetic Oligonucleotide
ggttcacgtggcaacgatcggacga

SEQ ID NO: 5011 - DNA, 25 bp, Artificial Sequence
  Synthetic Oligonucleotide
ggttgtcgaggtttcagcggacgtc

SEQ ID NO: 5012 - DNA, 25 bp, Artificial Sequence
  Synthetic Oligonucleotide
ttgttacacgttagtttcaggagcc

SEQ ID NO: 5013 - DNA, 25 bp, Artificial Sequence
  Synthetic Oligonucleotide
ttgtcatgatctattcaggttatac

SEQ ID NO: 5014 - DNA, 25 bp, Artificial Sequence
  Synthetic Oligonucleotide
tagtctgtcggcgtttttggttaat

SEQ ID NO: 5015 - DNA, 25 bp, Artificial Sequence
  Synthetic Oligonucleotide
agcgtgcggcttactactttgctaa

SEQ ID NO: 5016 - DNA, 25 bp, Artificial Sequence
  Synthetic Oligonucleotide
aaggagggtcttagtatgttgaaga

SEQ ID NO: 5017 - DNA, 25 bp, Artificial Sequence
  Synthetic Oligonucleotide
atggaggaggtttcattccgaagag

SEQ ID NO: 5018 - DNA, 25 bp, Artificial Sequence
  Synthetic Oligonucleotide
ttcaggtagctgacattctcgcaca

SEQ ID NO: 5019 - DNA, 25 bp, Artificial Sequence
  Synthetic Oligonucleotide
gtaaacagcgaaagtttctgccagt

SEQ ID NO: 5020 - DNA, 25 bp, Artificial Sequence
  Synthetic Oligonucleotide
gtaatattcgaaaagttgtacccga

SEQ ID NO: 5021 - DNA, 25 bp, Artificial Sequence
  Synthetic Oligonucleotide
tgaagtttcgctaaattttctacga

SEQ ID NO: 5022 - DNA, 25 bp, Artificial Sequence
  Synthetic Oligonucleotide
gagagttaagcaacatcttccatac

SEQ ID NO: 5023 - DNA, 25 bp, Artificial Sequence
  Synthetic Oligonucleotide
tgcgcgtcgagcaacatcttccaca

SEQ ID NO: 5024 - DNA, 25 bp, Artificial Sequence
  Synthetic Oligonucleotide
aacggccgcttctactctgcgacga

SEQ ID NO: 5025 - DNA, 25 bp, Artificial Sequence
  Synthetic Oligonucleotide
tgtgtcccttactaccgcgcgacga

SEQ ID NO: 5026 - DNA, 25 bp, Artificial Sequence
  Synthetic Oligonucleotide
ctgtcgtgccggacctaccggtgca

SEQ ID NO: 5027 - DNA, 25 bp, Artificial Sequence
  Synthetic Oligonucleotide
ctgatgctgccatagactagtagaa

SEQ ID NO: 5028 - DNA, 25 bp, Artificial Sequence
  Synthetic Oligonucleotide
tagaactccctcaacagtatgaaga

SEQ ID NO: 5029 - DNA, 25 bp, Artificial Sequence
  Synthetic Oligonucleotide
tttacgaaagcgtcatcaatcagaa

SEQ ID NO: 5030 - DNA, 25 bp, Artificial Sequence
  Synthetic Oligonucleotide
tccgaacagggctggcagtcagaac

SEQ ID NO: 5031 - DNA, 25 bp, Artificial Sequence
  Synthetic Oligonucleotide
cggtacaacaggtctgcgaccaatc

SEQ ID NO: 5032 - DNA, 25 bp, Artificial Sequence
  Synthetic Oligonucleotide
gggtacataccacactgaaccacaa

SEQ ID NO: 5033 - DNA, 25 bp, Artificial Sequence
  Synthetic Oligonucleotide
tctacaacgacgagacaggaccaaa

SEQ ID NO: 5034 - DNA, 25 bp, Artificial Sequence
  Synthetic Oligonucleotide
tcacacgcgggcaggagctcgacga

SEQ ID NO: 5035 - DNA, 25 bp, Artificial Sequence
  Synthetic Oligonucleotide
cctcagagcgagacagcgggtccga

SEQ ID NO: 5036 - DNA, 25 bp, Artificial Sequence
  Synthetic Oligonucleotide
ctcagagcgagacagcgggtccgac

SEQ ID NO: 5037 - DNA, 25 bp, Artificial Sequence
  Synthetic Oligonucleotide
cccaaagtggtacaaccggtccgac

SEQ ID NO: 5038 - DNA, 25 bp, Artificial Sequence
  Synthetic Oligonucleotide
caactcagtttaattcggcgtccga

SEQ ID NO: 5039 - DNA, 25 bp, Artificial Sequence
  Synthetic Oligonucleotide
acctcgaccttaatggcgccgacga

SEQ ID NO: 5040 - DNA, 25 bp, Artificial Sequence
  Synthetic Oligonucleotide
tcccatcgaatagttgtccgacgac

SEQ ID NO: 5041 - DNA, 25 bp, Artificial Sequence
  Synthetic Oligonucleotide
gtcccatcgaatagttgtccgacga

SEQ ID NO: 5042 - DNA, 25 bp, Artificial Sequence
  Synthetic Oligonucleotide
gacctcttgccggtgttccacgagc

SEQ ID NO: 5043 - DNA, 25 bp, Artificial Sequence
  Synthetic Oligonucleotide
ccacggttttcagagtatccgaaac

SEQ ID NO: 5044 - DNA, 25 bp, Artificial Sequence
  Synthetic Oligonucleotide
caccggacgtattttagtccggaaa

SEQ ID NO: 5045 - DNA, 25 bp, Artificial Sequence
  Synthetic Oligonucleotide
gcagggagaattagtaccggagtca

SEQ ID NO: 5046 - DNA, 25 bp, Artificial Sequence
  Synthetic Oligonucleotide
tatggagagaacgagactcggagca

SEQ ID NO: 5047 - DNA, 25 bp, Artificial Sequence
  Synthetic Oligonucleotide
ttgcataagtcaccgtacttcgcca

SEQ ID NO: 5048 - DNA, 25 bp, Artificial Sequence
  Synthetic Oligonucleotide
tttgatctcagttcgagttgtccca

SEQ ID NO: 5049 - DNA, 25 bp, Artificial Sequence
  Synthetic Oligonucleotide
gtacatccagtacatgagtcatcac

SEQ ID NO: 5050 - DNA, 25 bp, Artificial Sequence
  Synthetic Oligonucleotide
ataatatacattcatgtgacatcga

SEQ ID NO: 5051 - DNA, 25 bp, Artificial Sequence
  Synthetic Oligonucleotide
aaggtataaagtgtcggacagtcga

SEQ ID NO: 5052 - DNA, 25 bp, Artificial Sequence
  Synthetic Oligonucleotide
ggtcgttgcgattttagctagtcga

SEQ ID NO: 5053 - DNA, 25 bp, Artificial Sequence
  Synthetic Oligonucleotide
agtggtgttgcccgtctctccagca

SEQ ID NO: 5054 - DNA, 25 bp, Artificial Sequence
  Synthetic Oligonucleotide
cagcagttctacgatggcaagtcct

SEQ ID NO: 5055 - DNA, 25 bp, Artificial Sequence
  Synthetic Oligonucleotide
ctcatcggtgcgtgccactcctaga

SEQ ID NO: 5056 - DNA, 25 bp, Artificial Sequence
  Synthetic Oligonucleotide
gctgatggtagcattcaactatccc

SEQ ID NO: 5057 - DNA, 25 bp, Artificial Sequence
  Synthetic Oligonucleotide
gttatggagacactacgaatatcca

SEQ ID NO: 5058 - DNA, 25 bp, Artificial Sequence
  Synthetic Oligonucleotide
gaggagggaaactacaggtatcgaa

SEQ ID NO: 5059 - DNA, 25 bp, Artificial Sequence
  Synthetic Oligonucleotide
aagcggaagtgctacagttaccaca

SEQ ID NO: 5060 - DNA, 25 bp, Artificial Sequence
  Synthetic Oligonucleotide
cgacgtaacagcgacagctacccga

SEQ ID NO: 5061 - DNA, 25 bp, Artificial Sequence
  Synthetic Oligonucleotide
acatagtacccaaacctacacgtca

SEQ ID NO: 5062 - DNA, 25 bp, Artificial Sequence
  Synthetic Oligonucleotide
acattacatcagaacgcatacgcga

SEQ ID NO: 5063 - DNA, 25 bp, Artificial Sequence
  Synthetic Oligonucleotide
acacagtttcctctgacgcaaccga

SEQ ID NO: 5064 - DNA, 25 bp, Artificial Sequence
  Synthetic Oligonucleotide
ctaatgtttctgtagaacagaccga

SEQ ID NO: 5065 - DNA, 25 bp, Artificial Sequence
  Synthetic Oligonucleotide
ccgaacattttctcgtgttgaccgc

SEQ ID NO: 5066 - DNA, 25 bp, Artificial Sequence
  Synthetic Oligonucleotide
cgaaaatcttctgtgtctcgctaac

SEQ ID NO: 5067 - DNA, 25 bp, Artificial Sequence
  Synthetic Oligonucleotide
aaatagctcgtcgagtgggcgtaca

SEQ ID NO: 5068 - DNA, 25 bp, Artificial Sequence
  Synthetic Oligonucleotide
gactgctgtcggaacgtcgtggaca

SEQ ID NO: 5069 - DNA, 25 bp, Artificial Sequence
  Synthetic Oligonucleotide
actaggctcggcttagacgtcgaca

SEQ ID NO: 5070 - DNA, 25 bp, Artificial Sequence
  Synthetic Oligonucleotide
tgacgagaaccgtcagagatcgaga

SEQ ID NO: 5071 - DNA, 25 bp, Artificial Sequence
  Synthetic Oligonucleotide
ctacacgaactaaggcactaaaaga

SEQ ID NO: 5072 - DNA, 25 bp, Artificial Sequence
  Synthetic Oligonucleotide
cgcccgacgaagacgacgaagaaga

SEQ ID NO: 5073 - DNA, 25 bp, Artificial Sequence
  Synthetic Oligonucleotide
cccacgagacggatcataaagaatc

SEQ ID NO: 5074 - DNA, 17 bp, Artificial Sequence
  Synthetic Oligonucleotide
ttgccatcgtagaactg

SEQ ID NO: 5075 - DNA, 17 bp, Artificial Sequence
  Synthetic Oligonucleotide
cagttctacgatggcaa

SEQ ID NO: 5076 - DNA, 17 bp, Artificial Sequence
  Synthetic Oligonucleotide
ttgccatcgtagaactg

SEQ ID NO: 5077 - DNA, 17 bp, Artificial Sequence
  Synthetic Oligonucleotide
cagttctacgatggcaa

SEQ ID NO: 5078 - DNA, 17 bp, Artificial Sequence
  Synthetic Oligonucleotide
cttgccatcgtagaact

SEQ ID NO: 5079 - DNA, 17 bp, Artificial Sequence
  Synthetic Oligonucleotide
agttctacgatggcaag

SEQ ID NO: 5080 - DNA, 17 bp, Artificial Sequence
  Synthetic Oligonucleotide
cttgccatcgtagaact

SEQ ID NO: 5081 - DNA, 17 bp, Artificial Sequence
  Synthetic Oligonucleotide
agttctacgatggcaag

SEQ ID NO: 5082 - DNA, 17 bp, Artificial Sequence
  Synthetic Oligonucleotide
acttgccatcgtagaac

SEQ ID NO: 5083 - DNA, 17 bp, Artificial Sequence
  Synthetic Oligonucleotide
gttctacgatggcaagt

SEQ ID NO: 5084 - DNA, 17 bp, Artificial Sequence
  Synthetic Oligonucleotide
acttgccatcgtagaac

SEQ ID NO: 5085 - DNA, 17 bp, Artificial Sequence
  Synthetic Oligonucleotide
gttctacgatggcaagt

SEQ ID NO: 5086 - DNA, 17 bp, Artificial Sequence
  Synthetic Oligonucleotide
gacttgccatcgtagaa

SEQ ID NO: 5087 - DNA, 17 bp, Artificial Sequence
  Synthetic Oligonucleotide
ttctacgatggcaagtc

SEQ ID NO: 5088 - DNA, 17 bp, Artificial Sequence
  Synthetic Oligonucleotide
gacttgccatcgtagaa

SEQ ID NO: 5089 - DNA, 17 bp, Artificial Sequence
  Synthetic Oligonucleotide
ttctacgatggcaagtc

SEQ ID NO: 5090 - DNA, 25 bp, Artificial Sequence
  Synthetic Oligonucleotide
tagaattcttggtgcgctcgctaca

SEQ ID NO: 5091 - DNA, 25 bp, Artificial Sequence
  Synthetic Oligonucleotide
gaagccttcgtggagagagcgcaga

SEQ ID NO: 5092 - DNA, 25 bp, Artificial Sequence
  Synthetic Oligonucleotide
gagtcctctcgtaccagaactctaa

SEQ ID NO: 5093 - DNA, 25 bp, Artificial Sequence
  Synthetic Oligonucleotide
aactcggtcagggtcaggccgtaac

SEQ ID NO: 5094 - DNA, 25 bp, Artificial Sequence
  Synthetic Oligonucleotide
actcggtcagtctcatcgcgcgcac

SEQ ID NO: 5095 - DNA, 25 bp, Artificial Sequence
  Synthetic Oligonucleotide
tcctgatcctacacatcgtcgtgca

SEQ ID NO: 5096 - DNA, 25 bp, Artificial Sequence
  Synthetic Oligonucleotide
gctgctatctacgcttctgtcgtgc

SEQ ID NO: 5097 - DNA, 25 bp, Artificial Sequence
  Synthetic Oligonucleotide
acggccgcatccgatccgtgtgcga

SEQ ID NO: 5098 - DNA, 25 bp, Artificial Sequence
  Synthetic Oligonucleotide
acggccgcgtccgatccgtgtgcga

SEQ ID NO: 5099 - DNA, 25 bp, Artificial Sequence
  Synthetic Oligonucleotide
acgtttgtcgccgactggtagtgca

SEQ ID NO: 5100 - DNA, 25 bp, Artificial Sequence
  Synthetic Oligonucleotide
acccctgtgcctaccggtacggtca

SEQ ID NO: 5101 - DNA, 25 bp, Artificial Sequence
  Synthetic Oligonucleotide
atccctgtgcctaccggtacggtca

SEQ ID NO: 5102 - DNA, 25 bp, Artificial Sequence
  Synthetic Oligonucleotide
gtcccatccgtgagcgactcggtca

SEQ ID NO: 5103 - DNA, 25 bp, Artificial Sequence
  Synthetic Oligonucleotide
gtgacgcaaccgtaggcatggtcga

SEQ ID NO: 5104 - DNA, 25 bp, Artificial Sequence
  Synthetic Oligonucleotide
ccatcggcaaagtgtccgagggaga

SEQ ID NO: 5105 - DNA, 25 bp, Artificial Sequence
  Synthetic Oligonucleotide
ccatcggcaaagtgtccgagggaga

SEQ ID NO: 5106 - DNA, 25 bp, Artificial Sequence
  Synthetic Oligonucleotide
tccgaagagaggatcacgagggaga

SEQ ID NO: 5107 - DNA, 25 bp, Artificial Sequence
  Synthetic Oligonucleotide
cctcccagaggcagtcgcggcggaa

SEQ ID NO: 5108 - DNA, 25 bp, Artificial Sequence
  Synthetic Oligonucleotide
ctccaagaggtcgagtaagctataa

SEQ ID NO: 5109 - DNA, 25 bp, Artificial Sequence
  Synthetic Oligonucleotide
accctgagaaggttccgtggattaa

SEQ ID NO: 5110 - DNA, 25 bp, Artificial Sequence
  Synthetic Oligonucleotide
ctaggaggctagctctgtgacataa

SEQ ID NO: 5111 - DNA, 25 bp, Artificial Sequence
  Synthetic Oligonucleotide
agtaggtcgtgcatgtcgaactaca

SEQ ID NO: 5112 - DNA, 25 bp, Artificial Sequence
  Synthetic Oligonucleotide
tattagatcccgatgtatacgttca

SEQ ID NO: 5113 - DNA, 25 bp, Artificial Sequence
  Synthetic Oligonucleotide
ttcagatctcgtagtatcgtgtcga

SEQ ID NO: 5114 - DNA, 25 bp, Artificial Sequence
  Synthetic Oligonucleotide
gttcgagatctgacatcgtacgtca

SEQ ID NO: 5115 - DNA, 25 bp, Artificial Sequence
  Synthetic Oligonucleotide
gtctacacgaccaggctgtgtgtca

SEQ ID NO: 5116 - DNA, 25 bp, Artificial Sequence
  Synthetic Oligonucleotide
agtcactacaccagaacctgagtaa

SEQ ID NO: 5117 - DNA, 25 bp, Artificial Sequence
  Synthetic Oligonucleotide
atgacctacaccgactacgtataaa

SEQ ID NO: 5118 - DNA, 25 bp, Artificial Sequence
  Synthetic Oligonucleotide
gtcgcactaccccacttatactaca

SEQ ID NO: 5119 - DNA, 25 bp, Artificial Sequence
  Synthetic Oligonucleotide
ccgtcactaccgaacttgtcaacag

SEQ ID NO: 5120 - DNA, 25 bp, Artificial Sequence
  Synthetic Oligonucleotide
cgaagccgtccagttattctccaca

SEQ ID NO: 5121 - DNA, 25 bp, Artificial Sequence
  Synthetic Oligonucleotide
gcagctacagcaggttgttccctca

SEQ ID NO: 5122 - DNA, 25 bp, Artificial Sequence
  Synthetic Oligonucleotide
agccagtcctagtagtactccatca

SEQ ID NO: 5123 - DNA, 25 bp, Artificial Sequence
  Synthetic Oligonucleotide
gagaccagcggttccactccagtca

SEQ ID NO: 5124 - DNA, 25 bp, Artificial Sequence
  Synthetic Oligonucleotide
agacagcgggtcggacctcacgtca

SEQ ID NO: 5125 - DNA, 25 bp, Artificial Sequence
  Synthetic Oligonucleotide
gtctaagcagcacgacccctcttca

SEQ ID NO: 5126 - DNA, 25 bp, Artificial Sequence
  Synthetic Oligonucleotide
tcactaccagaatggccagtttcag

SEQ ID NO: 5127 - DNA, 25 bp, Artificial Sequence
  Synthetic Oligonucleotide
tacattaacagatgggtcagtttca

SEQ ID NO: 5128 - DNA, 25 bp, Artificial Sequence
  Synthetic Oligonucleotide
tacactaacagatgggtcagtttca

SEQ ID NO: 5129 - DNA, 25 bp, Artificial Sequence
  Synthetic Oligonucleotide
aactctggagaatgagtctgttcca

SEQ ID NO: 5130 - DNA, 25 bp, Artificial Sequence
  Synthetic Oligonucleotide
gactccaggtgtggagcgttggcca

SEQ ID NO: 5131 - DNA, 25 bp, Artificial Sequence
  Synthetic Oligonucleotide
aacttcaagagctgccgtttggaca

SEQ ID NO: 5132 - DNA, 25 bp, Artificial Sequence
  Synthetic Oligonucleotide
tgttcgacgcggacgtcttggacga

SEQ ID NO: 5133 - DNA, 25 bp, Artificial Sequence
  Synthetic Oligonucleotide
ggttcacgtggctacgatcggacga

SEQ ID NO: 5134 - DNA, 25 bp, Artificial Sequence
  Synthetic Oligonucleotide
ggttgtcgaggtatcagcggacgtc

SEQ ID NO: 5135 - DNA, 25 bp, Artificial Sequence
  Synthetic Oligonucleotide
ttgttacacgtttgtttcaggagcc

SEQ ID NO: 5136 - DNA, 25 bp, Artificial Sequence
  Synthetic Oligonucleotide
ttgtcatgatcttttcaggttatac

SEQ ID NO: 5137 - DNA, 25 bp, Artificial Sequence
  Synthetic Oligonucleotide
tagtctgtcggcctttttggttaat

SEQ ID NO: 5138 - DNA, 25 bp, Artificial Sequence
  Synthetic Oligonucleotide
agcgtgcggctttctactttgctaa

SEQ ID NO: 5139 - DNA, 25 bp, Artificial Sequence
  Synthetic Oligonucleotide
aaggagggtctttgtatgttgaaga

SEQ ID NO: 5140 - DNA, 25 bp, Artificial Sequence
  Synthetic Oligonucleotide
atggaggaggttacattccgaagag

SEQ ID NO: 5141 - DNA, 25 bp, Artificial Sequence
  Synthetic Oligonucleotide
ttcaggtagctgtcattctcgcaca

SEQ ID NO: 5142 - DNA, 25 bp, Artificial Sequence
  Synthetic Oligonucleotide
gtaaacagcgaatgtttctgccagt

SEQ ID NO: 5143 - DNA, 25 bp, Artificial Sequence
  Synthetic Oligonucleotide
gtaatattcgaatagttgtacccga

SEQ ID NO: 5144 - DNA, 25 bp, Artificial Sequence
  Synthetic Oligonucleotide
tgaagtttcgcttaattttctacga

SEQ ID NO: 5145 - DNA, 25 bp, Artificial Sequence
  Synthetic Oligonucleotide
gagagttaagcatcatcttccatac

SEQ ID NO: 5146 - DNA, 25 bp, Artificial Sequence
  Synthetic Oligonucleotide
tgcgcgtcgagctacatcttccaca

SEQ ID NO: 5147 - DNA, 25 bp, Artificial Sequence
  Synthetic Oligonucleotide
aacggccgcttcaactctgcgacga

SEQ ID NO: 5148 - DNA, 25 bp, Artificial Sequence
  Synthetic Oligonucleotide
tgtgtcccttacaaccgcgcgacga

SEQ ID NO: 5149 - DNA, 25 bp, Artificial Sequence
  Synthetic Oligonucleotide
ctgtcgtgccggtcctaccggtgca

SEQ ID NO: 5150 - DNA, 25 bp, Artificial Sequence
  Synthetic Oligonucleotide
ctgatgctgccaaagactagtagaa

SEQ ID NO: 5151 - DNA, 25 bp, Artificial Sequence
  Synthetic Oligonucleotide
tagaactccctctacagtatgaaga

SEQ ID NO: 5152 - DNA, 25 bp, Artificial Sequence
  Synthetic Oligonucleotide
tttacgaaagcgacatcaatcagaa

SEQ ID NO: 5153 - DNA, 25 bp, Artificial Sequence
  Synthetic Oligonucleotide
tccgaacagggcaggcagtcagaac

SEQ ID NO: 5154 - DNA, 25 bp, Artificial Sequence
  Synthetic Oligonucleotide
cggtacaacaggactgcgaccaatc

SEQ ID NO: 5155 - DNA, 25 bp, Artificial Sequence
  Synthetic Oligonucleotide
gggtacataccagactgaaccacaa

SEQ ID NO: 5156 - DNA, 25 bp, Artificial Sequence
  Synthetic Oligonucleotide
tctacaacgacgtgacaggaccaaa

SEQ ID NO: 5157 - DNA, 25 bp, Artificial Sequence
  Synthetic Oligonucleotide
tcacacgcgggctggagctcgacga

SEQ ID NO: 5158 - DNA, 25 bp, Artificial Sequence
  Synthetic Oligonucleotide
cctcagagcgagtcagcgggtccga

SEQ ID NO: 5159 - DNA, 25 bp, Artificial Sequence
  Synthetic Oligonucleotide
ctcagagcgagagagcgggtccgac

SEQ ID NO: 5160 - DNA, 25 bp, Artificial Sequence
  Synthetic Oligonucleotide
cccaaagtggtagaaccggtccgac

SEQ ID NO: 5161 - DNA, 25 bp, Artificial Sequence
  Synthetic Oligonucleotide
caactcagtttatttcggcgtccga

SEQ ID NO: 5162 - DNA, 25 bp, Artificial Sequence
  Synthetic Oligonucleotide
acctcgaccttattggcgccgacga

SEQ ID NO: 5163 - DNA, 25 bp, Artificial Sequence
  Synthetic Oligonucleotide
tcccatcgaatacttgtccgacgac

SEQ ID NO: 5164 - DNA, 25 bp, Artificial Sequence
  Synthetic Oligonucleotide
gtcccatcgaattgttgtccgacga

SEQ ID NO: 5165 - DNA, 25 bp, Artificial Sequence
  Synthetic Oligonucleotide
gacctcttgccgctgttccacgagc

SEQ ID NO: 5166 - DNA, 25 bp, Artificial Sequence
  Synthetic Oligonucleotide
ccacggttttcacagtatccgaaac

SEQ ID NO: 5167 - DNA, 25 bp, Artificial Sequence
  Synthetic Oligonucleotide
caccggacgtatattagtccggaaa

SEQ ID NO: 5168 - DNA, 25 bp, Artificial Sequence
  Synthetic Oligonucleotide
gcagggagaatttgtaccggagtca

SEQ ID NO: 5169 - DNA, 25 bp, Artificial Sequence
  Synthetic Oligonucleotide
tatggagagaaccagactcggagca

SEQ ID NO: 5170 - DNA, 25 bp, Artificial Sequence
  Synthetic Oligonucleotide
ttgcataagtcagcgtacttcgcca

SEQ ID NO: 5171 - DNA, 25 bp, Artificial Sequence
  Synthetic Oligonucleotide
tttgatctcagtacgagttgtccca

SEQ ID NO: 5172 - DNA, 25 bp, Artificial Sequence
  Synthetic Oligonucleotide
gtacatccagtagatgagtcatcac

SEQ ID NO: 5173 - DNA, 25 bp, Artificial Sequence
  Synthetic Oligonucleotide
ataatatacattgatgtgacatcga

SEQ ID NO: 5174 - DNA, 25 bp, Artificial Sequence
  Synthetic Oligonucleotide
aaggtataaagtctcggacagtcga

SEQ ID NO: 5175 - DNA, 25 bp, Artificial Sequence
  Synthetic Oligonucleotide
ggtcgttgcgatattagctagtcga

SEQ ID NO: 5176 - DNA, 25 bp, Artificial Sequence
  Synthetic Oligonucleotide
agtggtgttgccggtctctccagca

SEQ ID NO: 5177 - DNA, 25 bp, Artificial Sequence
  Synthetic Oligonucleotide
cagcagttctacgatggcaagtcct

SEQ ID NO: 5178 - DNA, 25 bp, Artificial Sequence
  Synthetic Oligonucleotide
aggacttgccatcgtagaactgctg

SEQ ID NO: 5179 - DNA, 25 bp, Artificial Sequence
  Synthetic Oligonucleotide
tcaaggcgaaccacgcagttcgaag

SEQ ID NO: 5180 - DNA, 25 bp, Artificial Sequence
  Synthetic Oligonucleotide
tcaaaggggcacaactcagtttaat

SEQ ID NO: 5181 - DNA, 25 bp, Artificial Sequence
  Synthetic Oligonucleotide
tcaaaggggcacaactcagtttaat

SEQ ID NO: 5182 - DNA, 25 bp, Artificial Sequence
  Synthetic Oligonucleotide
gagtagtggaagatcagcttatgat

SEQ ID NO: 5183 - DNA, 25 bp, Artificial Sequence
  Synthetic Oligonucleotide
ttgagagttaagcaacatcttccat

SEQ ID NO: 5184 - DNA, 25 bp, Artificial Sequence
  Synthetic Oligonucleotide
ggtgcgcctcgagcaacatcttcca

SEQ ID NO: 5185 - DNA, 25 bp, Artificial Sequence
  Synthetic Oligonucleotide
ggtgcgcgtcgagcaacatcttcca

SEQ ID NO: 5186 - DNA, 25 bp, Artificial Sequence
  Synthetic Oligonucleotide
ggttggcgagccacttcgtgtcttc

SEQ ID NO: 5187 - DNA, 25 bp, Artificial Sequence
  Synthetic Oligonucleotide
gcttcaggtcccgctgcatcgtgtc

SEQ ID NO: 5188 - DNA, 25 bp, Artificial Sequence
  Synthetic Oligonucleotide
gccatggcgcccactacggaaggtc

SEQ ID NO: 5189 - DNA, 25 bp, Artificial Sequence
  Synthetic Oligonucleotide
gccataggcgcctttgacaagccct

SEQ ID NO: 5190 - DNA, 25 bp, Artificial Sequence
  Synthetic Oligonucleotide
cgaaggctctagtctgctctagccc

SEQ ID NO: 5191 - DNA, 25 bp, Artificial Sequence
  Synthetic Oligonucleotide
accacagaaccagatggctgctatc

SEQ ID NO: 5192 - DNA, 25 bp, Artificial Sequence
  Synthetic Oligonucleotide
cccagggcatgaacggctgctacgg

SEQ ID NO: 5193 - DNA, 25 bp, Artificial Sequence
  Synthetic Oligonucleotide
ccagtggcctagtagctctagccga

SEQ ID NO: 5194 - DNA, 25 bp, Artificial Sequence
  Synthetic Oligonucleotide
aagttcgcgctgtcgctacagccga

SEQ ID NO: 5195 - DNA, 25 bp, Artificial Sequence
  Synthetic Oligonucleotide
aacgagtcgaccagttgaaatcgca

SEQ ID NO: 5196 - DNA, 25 bp, Artificial Sequence
  Synthetic Oligonucleotide
cactcgcaccagtatataagtcgca

SEQ ID NO: 5197 - DNA, 25 bp, Artificial Sequence
  Synthetic Oligonucleotide
cgcgcggcgctacaagaagtcgcga

SEQ ID NO: 5198 - DNA, 25 bp, Artificial Sequence
  Synthetic Oligonucleotide
gccgctgcttatcctagaagtacaa

SEQ ID NO: 5199 - DNA, 17 bp, Artificial Sequence
  Synthetic Oligonucleotide
cagttctacgatggcaa

SEQ ID NO: 5200 - DNA, 17 bp, Artificial Sequence
  Synthetic Oligonucleotide
ttgccatcgtagaactg

SEQ ID NO: 5201 - DNA, 17 bp, Artificial Sequence
  Synthetic Oligonucleotide
cagttctacgatggcaa

SEQ ID NO: 5202 - DNA, 17 bp, Artificial Sequence
  Synthetic Oligonucleotide
ttgccatcgtagaactg

SEQ ID NO: 5203 - DNA, 17 bp, Artificial Sequence
  Synthetic Oligonucleotide
agttctacgatggcaag

SEQ ID NO: 5204 - DNA, 17 bp, Artificial Sequence
  Synthetic Oligonucleotide
cttgccatcgtagaact

SEQ ID NO: 5205 - DNA, 17 bp, Artificial Sequence
  Synthetic Oligonucleotide
agttctacgatggcaag

SEQ ID NO: 5206 - DNA, 17 bp, Artificial Sequence
  Synthetic Oligonucleotide
cttgccatcgtagaact

SEQ ID NO: 5207 - DNA, 17 bp, Artificial Sequence
  Synthetic Oligonucleotide
gttctacgatggcaagt

SEQ ID NO: 5208 - DNA, 17 bp, Artificial Sequence
  Synthetic Oligonucleotide
acttgccatcgtagaac

SEQ ID NO: 5209 - DNA, 17 bp, Artificial Sequence
  Synthetic Oligonucleotide
gttctacgatggcaagt

SEQ ID NO: 5210 - DNA, 17 bp, Artificial Sequence
  Synthetic Oligonucleotide
acttgccatcgtagaac

SEQ ID NO: 5211 - DNA, 17 bp, Artificial Sequence
  Synthetic Oligonucleotide
ttctacgatggcaagtc

SEQ ID NO: 5212 - DNA, 17 bp, Artificial Sequence
  Synthetic Oligonucleotide
gacttgccatcgtagaa

SEQ ID NO: 5213 - DNA, 17 bp, Artificial Sequence
  Synthetic Oligonucleotide
ttctacgatggcaagtc

SEQ ID NO: 5214 - DNA, 17 bp, Artificial Sequence
  Synthetic Oligonucleotide
gacttgccatcgtagaa

SEQ ID NO: 5215 - DNA, 25 bp, Artificial Sequence
  Synthetic Oligonucleotide
ttgaggtacctgtctgtgatcacca

SEQ ID NO: 5216 - DNA, 25 bp, Artificial Sequence
  Synthetic Oligonucleotide
tgaggtacctgtctgtgatcaccac

SEQ ID NO: 5217 - DNA, 25 bp, Artificial Sequence
  Synthetic Oligonucleotide
gtagtcacccgactcggaggtccac

SEQ ID NO: 5218 - DNA, 25 bp, Artificial Sequence
  Synthetic Oligonucleotide
cgtagtcacccgactcggaggtcca

SEQ ID NO: 5219 - DNA, 25 bp, Artificial Sequence
  Synthetic Oligonucleotide
agtccccggtgtgcgtcgagtaaca

SEQ ID NO: 5220 - DNA, 25 bp, Artificial Sequence
  Synthetic Oligonucleotide
gtaatgcccgtacatcgcgttgaca

SEQ ID NO: 5221 - DNA, 25 bp, Artificial Sequence
  Synthetic Oligonucleotide
ttgccgtagacgatgacttagacga

SEQ ID NO: 5222 - DNA, 25 bp, Artificial Sequence
  Synthetic Oligonucleotide
acgtcctccgtaacgactactagaa

SEQ ID NO: 5223 - DNA, 25 bp, Artificial Sequence
  Synthetic Oligonucleotide
gcactctgtccacgacgtaccgaca

SEQ ID NO: 5224 - DNA, 25 bp, Artificial Sequence
  Synthetic Oligonucleotide
aagactttgtacaaggagactccga

SEQ ID NO: 5225 - DNA, 25 bp, Artificial Sequence
  Synthetic Oligonucleotide
aacctccggtacatccggtactcca

SEQ ID NO: 5226 - DNA, 25 bp, Artificial Sequence
  Synthetic Oligonucleotide
tattaccggtttctgtactcgtaca

SEQ ID NO: 5227 - DNA, 25 bp, Artificial Sequence
  Synthetic Oligonucleotide
gatacccgtggtgtccttgtcgtcc

SEQ ID NO: 5228 - DNA, 25 bp, Artificial Sequence
  Synthetic Oligonucleotide
gacgagtaccaaattcccttttcga

SEQ ID NO: 5229 - DNA, 25 bp, Artificial Sequence
  Synthetic Oligonucleotide
gaagacgataggactccctttgaag

SEQ ID NO: 5230 - DNA, 25 bp, Artificial Sequence
  Synthetic Oligonucleotide
gaagggatagggtgcctttacagac

SEQ ID NO: 5231 - DNA, 25 bp, Artificial Sequence
  Synthetic Oligonucleotide
gaggccccggtgtgcctcgagcaac

SEQ ID NO: 5232 - DNA, 25 bp, Artificial Sequence
  Synthetic Oligonucleotide
tgaccccgagtgtaactgtccctaa

SEQ ID NO: 5233 - DNA, 25 bp, Artificial Sequence
  Synthetic Oligonucleotide
tttaagaggcgagactctacctcaa

SEQ ID NO: 5234 - DNA, 25 bp, Artificial Sequence
  Synthetic Oligonucleotide
cgagacggtcgaaccgctctctaaa

SEQ ID NO: 5235 - DNA, 25 bp, Artificial Sequence
  Synthetic Oligonucleotide
ccggtcggtcccagtgtgtcataca

SEQ ID NO: 5236 - DNA, 25 bp, Artificial Sequence
  Synthetic Oligonucleotide
cccgtgagtcggagatgtgactaca

SEQ ID NO: 5237 - DNA, 25 bp, Artificial Sequence
  Synthetic Oligonucleotide
cacgtcgatcgcaacctctgttaca

SEQ ID NO: 5238 - DNA, 25 bp, Artificial Sequence
  Synthetic Oligonucleotide
gtccacaacagtgcttgctttaaca

SEQ ID NO: 5239 - DNA, 25 bp, Artificial Sequence
  Synthetic Oligonucleotide
tgcatacaattgtgtgcgcctccac

SEQ ID NO: 5240 - DNA, 25 bp, Artificial Sequence
  Synthetic Oligonucleotide
cataaacgttagaaggcctgttcga

SEQ ID NO: 5241 - DNA, 25 bp, Artificial Sequence
  Synthetic Oligonucleotide
taccctaaaggtaactactgttcga

SEQ ID NO: 5242 - DNA, 25 bp, Artificial Sequence
  Synthetic Oligonucleotide
agagtcgtagaaggttaactttcga

SEQ ID NO: 5243 - DNA, 25 bp, Artificial Sequence
  Synthetic Oligonucleotide
aatgagactataacgactactttaa

SEQ ID NO: 5244 - DNA, 25 bp, Artificial Sequence
  Synthetic Oligonucleotide
tctttgagactcttgtcgaactaaa

SEQ ID NO: 5245 - DNA, 25 bp, Artificial Sequence
  Synthetic Oligonucleotide
aaccttgtacatttggtacatcaac

SEQ ID NO: 5246 - DNA, 25 bp, Artificial Sequence
  Synthetic Oligonucleotide
gaccttgtacatctggtacatcaac

SEQ ID NO: 5247 - DNA, 25 bp, Artificial Sequence
  Synthetic Oligonucleotide
aatgtcgagtcacgtggtacttcaa

SEQ ID NO: 5248 - DNA, 25 bp, Artificial Sequence
  Synthetic Oligonucleotide
caaagtggtacaaccggtccgacca

SEQ ID NO: 5249 - DNA, 25 bp, Artificial Sequence
  Synthetic Oligonucleotide
ctaaagggagagtcgacaccaccac

SEQ ID NO: 5250 - DNA, 25 bp, Artificial Sequence
  Synthetic Oligonucleotide
ttagagggcgagtcgcgagcatcac

SEQ ID NO: 5251 - DNA, 25 bp, Artificial Sequence
  Synthetic Oligonucleotide
tcgaagggtaagagtcggaactgac

SEQ ID NO: 5252 - DNA, 25 bp, Artificial Sequence
  Synthetic Oligonucleotide
agttgggtaagacgtggtacttgac

SEQ ID NO: 5253 - DNA, 25 bp, Artificial Sequence
  Synthetic Oligonucleotide
agtctgaccgaactgagtatttcag

SEQ ID NO: 5254 - DNA, 25 bp, Artificial Sequence
  Synthetic Oligonucleotide
aaccagagcgaagtataggtttaca

SEQ ID NO: 5255 - DNA, 25 bp, Artificial Sequence
  Synthetic Oligonucleotide
catcacaaccttgttatggactaca

SEQ ID NO: 5256 - DNA, 25 bp, Artificial Sequence
  Synthetic Oligonucleotide
actatgccaccttccgtcttgggaa

SEQ ID NO: 5257 - DNA, 25 bp, Artificial Sequence
  Synthetic Oligonucleotide
cttccccgtctctactactgggaaa

SEQ ID NO: 5258 - DNA, 25 bp, Artificial Sequence
  Synthetic Oligonucleotide
ctgtttccgcttactctgaagagaa

SEQ ID NO: 5259 - DNA, 25 bp, Artificial Sequence
  Synthetic Oligonucleotide
ctttgtctggggttctcagaaagtt

SEQ ID NO: 5260 - DNA, 25 bp, Artificial Sequence
  Synthetic Oligonucleotide
gttttgctctttacttcagaaagtc

SEQ ID NO: 5261 - DNA, 25 bp, Artificial Sequence
  Synthetic Oligonucleotide
gttaggccgttttttcagtgaagac

SEQ ID NO: 5262 - DNA, 25 bp, Artificial Sequence
  Synthetic Oligonucleotide
ggtcgaccgtttctaatatgaagac

SEQ ID NO: 5263 - DNA, 25 bp, Artificial Sequence
  Synthetic Oligonucleotide
catttacggtttgtacttagtcaaa

SEQ ID NO: 5264 - DNA, 25 bp, Artificial Sequence
  Synthetic Oligonucleotide
gatagtttatttgctattgactaaa

SEQ ID NO: 5265 - DNA, 25 bp, Artificial Sequence
  Synthetic Oligonucleotide
tgtagttcgttcacattcacgtaaa

SEQ ID NO: 5266 - DNA, 25 bp, Artificial Sequence
  Synthetic Oligonucleotide
atggtaggatgtacatctcagacaa

SEQ ID NO: 5267 - DNA, 25 bp, Artificial Sequence
  Synthetic Oligonucleotide
atgacaagattaaagtctctgacca

SEQ ID NO: 5268 - DNA, 25 bp, Artificial Sequence
  Synthetic Oligonucleotide
cgcaagtcgttcgagttactgctca

SEQ ID NO: 5269 - DNA, 25 bp, Artificial Sequence
  Synthetic Oligonucleotide
agacaccagacttcagatcttccca

SEQ ID NO: 5270 - DNA, 25 bp, Artificial Sequence
  Synthetic Oligonucleotide
ataacctcgaccttaatggcgccga

SEQ ID NO: 5271 - DNA, 25 bp, Artificial Sequence
  Synthetic Oligonucleotide
agacctacaacatcagtcggtccca

SEQ ID NO: 5272 - DNA, 25 bp, Artificial Sequence
  Synthetic Oligonucleotide
cgtacctaagactgaatctccgcaa

SEQ ID NO: 5273 - DNA, 25 bp, Artificial Sequence
  Synthetic Oligonucleotide
gacggaggctaactaccgcgactaa

SEQ ID NO: 5274 - DNA, 25 bp, Artificial Sequence
  Synthetic Oligonucleotide
gacactacgggttccgccggtacca

SEQ ID NO: 5275 - DNA, 25 bp, Artificial Sequence
  Synthetic Oligonucleotide
gaagtatgcgtgtccagtagtacca

SEQ ID NO: 5276 - DNA, 25 bp, Artificial Sequence
  Synthetic Oligonucleotide
tgcagtcttctgtcgactagctaaa

SEQ ID NO: 5277 - DNA, 25 bp, Artificial Sequence
  Synthetic Oligonucleotide
aactatctattgatacagacctaaa

SEQ ID NO: 5278 - DNA, 25 bp, Artificial Sequence
  Synthetic Oligonucleotide
acaaactcgtttagtagagctaaaa

SEQ ID NO: 5279 - DNA, 25 bp, Artificial Sequence
  Synthetic Oligonucleotide
acgaatatccatctaggtctcagaa

SEQ ID NO: 5280 - DNA, 25 bp, Artificial Sequence
  Synthetic Oligonucleotide
agaatacgccataatcgatagcaaa

SEQ ID NO: 5281 - DNA, 25 bp, Artificial Sequence
  Synthetic Oligonucleotide
aaacccgaagtctgagtagtctaaa

SEQ ID NO: 5282 - DNA, 25 bp, Artificial Sequence
  Synthetic Oligonucleotide
acgcgagtcctcctcgttactagaa

SEQ ID NO: 5283 - DNA, 25 bp, Artificial Sequence
  Synthetic Oligonucleotide
taacggacttctcctctgtaacgaa

SEQ ID NO: 5284 - DNA, 25 bp, Artificial Sequence
  Synthetic Oligonucleotide
agaggaggtacatcgtccgtaacca

SEQ ID NO: 5285 - DNA, 25 bp, Artificial Sequence
  Synthetic Oligonucleotide
cgagagtcgggaacctaccactcca

SEQ ID NO: 5286 - DNA, 25 bp, Artificial Sequence
  Synthetic Oligonucleotide
acgtaagaagacttcctcgccttca

SEQ ID NO: 5287 - DNA, 25 bp, Artificial Sequence
  Synthetic Oligonucleotide
agcgggcacgtgtcgcgcgccttca

SEQ ID NO: 5288 - DNA, 25 bp, Artificial Sequence
  Synthetic Oligonucleotide
tgtgccgctctgtcgccgattcaca

SEQ ID NO: 5289 - DNA, 25 bp, Artificial Sequence
  Synthetic Oligonucleotide
gtgtcgggatctatcccgatgccgg

SEQ ID NO: 5290 - DNA, 25 bp, Artificial Sequence
  Synthetic Oligonucleotide
tgtcgggatctatcccgatgccggg

SEQ ID NO: 5291 - DNA, 25 bp, Artificial Sequence
  Synthetic Oligonucleotide
ctgtagattcccgtagtgtctggac

SEQ ID NO: 5292 - DNA, 25 bp, Artificial Sequence
  Synthetic Oligonucleotide
aacgttaagttcacgctaatcccag

SEQ ID NO: 5293 - DNA, 25 bp, Artificial Sequence
  Synthetic Oligonucleotide
gcgtgaagtactacctcaacttcca

SEQ ID NO: 5294 - DNA, 25 bp, Artificial Sequence
  Synthetic Oligonucleotide
cgagtgagagacaccacaagaagca

SEQ ID NO: 5295 - DNA, 25 bp, Artificial Sequence
  Synthetic Oligonucleotide
gctagtggaacagctccaagcccga

SEQ ID NO: 5296 - DNA, 25 bp, Artificial Sequence
  Synthetic Oligonucleotide
cttgtcgaactaaaaaagtccctag

SEQ ID NO: 5297 - DNA, 25 bp, Artificial Sequence
  Synthetic Oligonucleotide
tttgagtcgaaaaagattgacccac

SEQ ID NO: 5298 - DNA, 25 bp, Artificial Sequence
  Synthetic Oligonucleotide
gagcgagacagcgggtccgacctca

SEQ ID NO: 5299 - DNA, 25 bp, Artificial Sequence
  Synthetic Oligonucleotide
gcgtcgagtaacatcttccacacca

SEQ ID NO: 5300 - DNA, 25 bp, Artificial Sequence
  Synthetic Oligonucleotide
ggtcgtttctagtccgcgacgacca

SEQ ID NO: 5301 - DNA, 25 bp, Artificial Sequence
  Synthetic Oligonucleotide
ggtcgtttctagtccgcgacgacca

SEQ ID NO: 5302 - DNA, 25 bp, Artificial Sequence
  Synthetic Oligonucleotide
ggtcgcttctactcggcgacgacca

SEQ ID NO: 5303 - DNA, 25 bp, Artificial Sequence
  Synthetic Oligonucleotide
aggacttgccatcgtagaactgctg

SEQ ID NO: 5304 - DNA, 25 bp, Artificial Sequence
  Synthetic Oligonucleotide
cagcagttctacgatggcaagtcct

SEQ ID NO: 5305 - DNA, 25 bp, Artificial Sequence
  Synthetic Oligonucleotide
tcaaggcgaacctcgcagttcgaag

SEQ ID NO: 5306 - DNA, 25 bp, Artificial Sequence
  Synthetic Oligonucleotide
tcaaaggggcactactcagtttaat

SEQ ID NO: 5307 - DNA, 25 bp, Artificial Sequence
  Synthetic Oligonucleotide
tcaaaggggcactactcagtttaat

SEQ ID NO: 5308 - DNA, 25 bp, Artificial Sequence
  Synthetic Oligonucleotide
gagtagtggaagttcagcttatgat

SEQ ID NO: 5309 - DNA, 25 bp, Artificial Sequence
  Synthetic Oligonucleotide
ttgagagttaaggaacatcttccat

SEQ ID NO: 5310 - DNA, 25 bp, Artificial Sequence
  Synthetic Oligonucleotide
ggtgcgcctcgaccaacatcttcca

SEQ ID NO: 5311 - DNA, 25 bp, Artificial Sequence
  Synthetic Oligonucleotide
ggtgcgcgtcgaccaacatcttcca

SEQ ID NO: 5312 - DNA, 25 bp, Artificial Sequence
  Synthetic Oligonucleotide
ggttggcgagcctcttcgtgtcttc

SEQ ID NO: 5313 - DNA, 25 bp, Artificial Sequence
  Synthetic Oligonucleotide
gcttcaggtccccctgcatcgtgtc

SEQ ID NO: 5314 - DNA, 25 bp, Artificial Sequence
  Synthetic Oligonucleotide
gccatggcgccctctacggaaggtc

SEQ ID NO: 5315 - DNA, 25 bp, Artificial Sequence
  Synthetic Oligonucleotide
gccataggcgccattgacaagccct

SEQ ID NO: 5316 - DNA, 25 bp, Artificial Sequence
  Synthetic Oligonucleotide
cgaaggctctagactgctctagccc

SEQ ID NO: 5317 - DNA, 25 bp, Artificial Sequence
  Synthetic Oligonucleotide
accacagaaccacatggctgctatc

SEQ ID NO: 5318 - DNA, 25 bp, Artificial Sequence
  Synthetic Oligonucleotide
cccagggcatgatcggctgctacgg

SEQ ID NO: 5319 - DNA, 25 bp, Artificial Sequence
  Synthetic Oligonucleotide
ccagtggcctagaagctctagccga

SEQ ID NO: 5320 - DNA, 25 bp, Artificial Sequence
  Synthetic Oligonucleotide
aagttcgcgctgacgctacagccga

SEQ ID NO: 5321 - DNA, 25 bp, Artificial Sequence
  Synthetic Oligonucleotide
aacgagtcgacctgttgaaatcgca

SEQ ID NO: 5322 - DNA, 25 bp, Artificial Sequence
  Synthetic Oligonucleotide
cactcgcaccagaatataagtcgca

SEQ ID NO: 5323 - DNA, 25 bp, Artificial Sequence
  Synthetic Oligonucleotide
cgcgcggcgctagaagaagtcgcga

SEQ ID NO: 5324 - DNA, 25 bp, Artificial Sequence
  Synthetic Oligonucleotide
gccgctgcttatgctagaagtacaa

SEQ ID NO: 5325 - DNA, 17 bp, Artificial Sequence
  Synthetic Oligonucleotide
ttgccatcgtagaactg

SEQ ID NO: 5326 - DNA, 17 bp, Artificial Sequence
  Synthetic Oligonucleotide
cagttctacgatggcaa

SEQ ID NO: 5327 - DNA, 17 bp, Artificial Sequence
  Synthetic Oligonucleotide
ttgccatcgtagaactg

SEQ ID NO: 5328 - DNA, 17 bp, Artificial Sequence
  Synthetic Oligonucleotide
cagttctacgatggcaa

SEQ ID NO: 5329 - DNA, 17 bp, Artificial Sequence
  Synthetic Oligonucleotide
cttgccatcgtagaact

SEQ ID NO: 5330 - DNA, 17 bp, Artificial Sequence
  Synthetic Oligonucleotide
agttctacgatggcaag

SEQ ID NO: 5331 - DNA, 17 bp, Artificial Sequence
  Synthetic Oligonucleotide
cttgccatcgtagaact

SEQ ID NO: 5332 - DNA, 17 bp, Artificial Sequence
  Synthetic Oligonucleotide
agttctacgatggcaag

SEQ ID NO: 5333 - DNA, 17 bp, Artificial Sequence
  Synthetic Oligonucleotide
acttgccatcgtagaac

SEQ ID NO: 5334 - DNA, 17 bp, Artificial Sequence
  Synthetic Oligonucleotide
gttctacgatggcaagt

SEQ ID NO: 5335 - DNA, 17 bp, Artificial Sequence
  Synthetic Oligonucleotide
acttgccatcgtagaac

SEQ ID NO: 5336 - DNA, 17 bp, Artificial Sequence
  Synthetic Oligonucleotide
gttctacgatggcaagt

SEQ ID NO: 5337 - DNA, 17 bp, Artificial Sequence
  Synthetic Oligonucleotide
gacttgccatcgtagaa

SEQ ID NO: 5338 - DNA, 17 bp, Artificial Sequence
  Synthetic Oligonucleotide
ttctacgatggcaagtc

SEQ ID NO: 5339 - DNA, 17 bp, Artificial Sequence
  Synthetic Oligonucleotide
gacttgccatcgtagaa

SEQ ID NO: 5340 - DNA, 17 bp, Artificial Sequence
  Synthetic Oligonucleotide
ttctacgatggcaagtc

SEQ ID NO: 5341 - DNA, 25 bp, Artificial Sequence
  Synthetic Oligonucleotide
ttgaggtacctgactgtgatcacca

SEQ ID NO: 5342 - DNA, 25 bp, Artificial Sequence
  Synthetic Oligonucleotide
tgaggtacctgtgtgtgatcaccac

SEQ ID NO: 5343 - DNA, 25 bp, Artificial Sequence
  Synthetic Oligonucleotide
gtagtcacccgagtcggaggtccac

SEQ ID NO: 5344 - DNA, 25 bp, Artificial Sequence
  Synthetic Oligonucleotide
cgtagtcacccgtctcggaggtcca

SEQ ID NO: 5345 - DNA, 25 bp, Artificial Sequence
  Synthetic Oligonucleotide
agtccccggtgtccgtcgagtaaca

SEQ ID NO: 5346 - DNA, 25 bp, Artificial Sequence
  Synthetic Oligonucleotide
gtaatgcccgtagatcgcgttgaca

SEQ ID NO: 5347 - DNA, 25 bp, Artificial Sequence
  Synthetic Oligonucleotide
ttgccgtagacgttgacttagacga

SEQ ID NO: 5348 - DNA, 25 bp, Artificial Sequence
  Synthetic Oligonucleotide
acgtcctccgtatcgactactagaa

SEQ ID NO: 5349 - DNA, 25 bp, Artificial Sequence
  Synthetic Oligonucleotide
gcactctgtccaggacgtaccgaca

SEQ ID NO: 5350 - DNA, 25 bp, Artificial Sequence
  Synthetic Oligonucleotide
aagactttgtactaggagactccga

SEQ ID NO: 5351 - DNA, 25 bp, Artificial Sequence
  Synthetic Oligonucleotide
aacctccggtacttccggtactcca

SEQ ID NO: 5352 - DNA, 25 bp, Artificial Sequence
  Synthetic Oligonucleotide
tattaccggtttgtgtactcgtaca

SEQ ID NO: 5353 - DNA, 25 bp, Artificial Sequence
  Synthetic Oligonucleotide
gatacccgtggtctccttgtcgtcc

SEQ ID NO: 5354 - DNA, 25 bp, Artificial Sequence
  Synthetic Oligonucleotide
gacgagtaccaatttcccttttcga

SEQ ID NO: 5355 - DNA, 25 bp, Artificial Sequence
  Synthetic Oligonucleotide
gaagacgataggtctccctttgaag

SEQ ID NO: 5356 - DNA, 25 bp, Artificial Sequence
  Synthetic Oligonucleotide
gaagggatagggagcctttacagac

SEQ ID NO: 5357 - DNA, 25 bp, Artificial Sequence
  Synthetic Oligonucleotide
gaggccccggtgagcctcgagcaac

SEQ ID NO: 5358 - DNA, 25 bp, Artificial Sequence
  Synthetic Oligonucleotide
tgaccccgagtgaaactgtccctaa

SEQ ID NO: 5359 - DNA, 25 bp, Artificial Sequence
  Synthetic Oligonucleotide
tttaagaggcgacactctacctcaa

SEQ ID NO: 5360 - DNA, 25 bp, Artificial Sequence
  Synthetic Oligonucleotide
cgagacggtcgatccgctctctaaa

SEQ ID NO: 5361 - DNA, 25 bp, Artificial Sequence
  Synthetic Oligonucleotide
ccggtcggtccctgtgtgtcataca

SEQ ID NO: 5362 - DNA, 25 bp, Artificial Sequence
  Synthetic Oligonucleotide
cccgtgagtcggtgatgtgactaca

SEQ ID NO: 5363 - DNA, 25 bp, Artificial Sequence
  Synthetic Oligonucleotide
cacgtcgatcgctacctctgttaca

SEQ ID NO: 5364 - DNA, 25 bp, Artificial Sequence
  Synthetic Oligonucleotide
gtccacaacagtccttgctttaaca

SEQ ID NO: 5365 - DNA, 25 bp, Artificial Sequence
  Synthetic Oligonucleotide
tgcatacaattgagtgcgcctccac

SEQ ID NO: 5366 - DNA, 25 bp, Artificial Sequence
  Synthetic Oligonucleotide
cataaacgttagtaggcctgttcga

SEQ ID NO: 5367 - DNA, 25 bp, Artificial Sequence
  Synthetic Oligonucleotide
taccctaaaggttactactgttcga

SEQ ID NO: 5368 - DNA, 25 bp, Artificial Sequence
  Synthetic Oligonucleotide
agagtcgtagaacgttaactttcga

SEQ ID NO: 5369 - DNA, 25 bp, Artificial Sequence
  Synthetic Oligonucleotide
aatgagactatatcgactactttaa

SEQ ID NO: 5370 - DNA, 25 bp, Artificial Sequence
  Synthetic Oligonucleotide
tctttgagactcatgtcgaactaaa

SEQ ID NO: 5371 - DNA, 25 bp, Artificial Sequence
  Synthetic Oligonucleotide
aaccttgtacatatggtacatcaac

SEQ ID NO: 5372 - DNA, 25 bp, Artificial Sequence
  Synthetic Oligonucleotide
gaccttgtacatgtggtacatcaac

SEQ ID NO: 5373 - DNA, 25 bp, Artificial Sequence
  Synthetic Oligonucleotide
aatgtcgagtcaggtggtacttcaa

SEQ ID NO: 5374 - DNA, 25 bp, Artificial Sequence
  Synthetic Oligonucleotide
caaagtggtacatccggtccgacca

SEQ ID NO: 5375 - DNA, 25 bp, Artificial Sequence
  Synthetic Oligonucleotide
ctaaagggagagacgacaccaccac

SEQ ID NO: 5376 - DNA, 25 bp, Artificial Sequence
  Synthetic Oligonucleotide
ttagagggcgagacgcgagcatcac

SEQ ID NO: 5377 - DNA, 25 bp, Artificial Sequence
  Synthetic Oligonucleotide
tcgaagggtaagtgtcggaactgac

SEQ ID NO: 5378 - DNA, 25 bp, Artificial Sequence
  Synthetic Oligonucleotide
agttgggtaagaggtggtacttgac

SEQ ID NO: 5379 - DNA, 25 bp, Artificial Sequence
  Synthetic Oligonucleotide
agtctgaccgaagtgagtatttcag

SEQ ID NO: 5380 - DNA, 25 bp, Artificial Sequence
  Synthetic Oligonucleotide
aaccagagcgaactataggtttaca

SEQ ID NO: 5381 - DNA, 25 bp, Artificial Sequence
  Synthetic Oligonucleotide
catcacaaccttcttatggactaca

SEQ ID NO: 5382 - DNA, 25 bp, Artificial Sequence
  Synthetic Oligonucleotide
actatgccacctaccgtcttgggaa

SEQ ID NO: 5383 - DNA, 25 bp, Artificial Sequence
  Synthetic Oligonucleotide
cttccccgtctcaactactgggaaa

SEQ ID NO: 5384 - DNA, 25 bp, Artificial Sequence
  Synthetic Oligonucleotide
ctgtttccgctttctctgaagagaa

SEQ ID NO: 5385 - DNA, 25 bp, Artificial Sequence
  Synthetic Oligonucleotide
ctttgtctggggatctcagaaagtt

SEQ ID NO: 5386 - DNA, 25 bp, Artificial Sequence
  Synthetic Oligonucleotide
gttttgctcttttcttcagaaagtc

SEQ ID NO: 5387 - DNA, 25 bp, Artificial Sequence
  Synthetic Oligonucleotide
gttaggccgtttattcagtgaagac

SEQ ID NO: 5388 - DNA, 25 bp, Artificial Sequence
  Synthetic Oligonucleotide
ggtcgaccgtttgtaatatgaagac

SEQ ID NO: 5389 - DNA, 25 bp, Artificial Sequence
  Synthetic Oligonucleotide
catttacggtttctacttagtcaaa

SEQ ID NO: 5390 - DNA, 25 bp, Artificial Sequence
  Synthetic Oligonucleotide
gatagtttatttcctattgactaaa

SEQ ID NO: 5391 - DNA, 25 bp, Artificial Sequence
  Synthetic Oligonucleotide
tgtagttcgttctcattcacgtaaa

SEQ ID NO: 5392 - DNA, 25 bp, Artificial Sequence
  Synthetic Oligonucleotide
atggtaggatgttcatctcagacaa

SEQ ID NO: 5393 - DNA, 25 bp, Artificial Sequence
  Synthetic Oligonucleotide
atgacaagattatagtctctgacca

SEQ ID NO: 5394 - DNA, 25 bp, Artificial Sequence
  Synthetic Oligonucleotide
cgcaagtcgttccagttactgctca

SEQ ID NO: 5395 - DNA, 25 bp, Artificial Sequence
  Synthetic Oligonucleotide
agacaccagactacagatcttccca

SEQ ID NO: 5396 - DNA, 25 bp, Artificial Sequence
  Synthetic Oligonucleotide
ataacctcgaccataatggcgccga

SEQ ID NO: 5397 - DNA, 25 bp, Artificial Sequence
  Synthetic Oligonucleotide
agacctacaacaacagtcggtccca

SEQ ID NO: 5398 - DNA, 25 bp, Artificial Sequence
  Synthetic Oligonucleotide
cgtacctaagacagaatctccgcaa

SEQ ID NO: 5399 - DNA, 25 bp, Artificial Sequence
  Synthetic Oligonucleotide
gacggaggctaagtaccgcgactaa

SEQ ID NO: 5400 - DNA, 25 bp, Artificial Sequence
  Synthetic Oligonucleotide
gacactacgggtaccgccggtacca

SEQ ID NO: 5401 - DNA, 25 bp, Artificial Sequence
  Synthetic Oligonucleotide
gaagtatgcgtgaccagtagtacca

SEQ ID NO: 5402 - DNA, 25 bp, Artificial Sequence
  Synthetic Oligonucleotide
tgcagtcttctgacgactagctaaa

SEQ ID NO: 5403 - DNA, 25 bp, Artificial Sequence
  Synthetic Oligonucleotide
aactatctattgttacagacctaaa

SEQ ID NO: 5404 - DNA, 25 bp, Artificial Sequence
  Synthetic Oligonucleotide
acaaactcgttttgtagagctaaaa

SEQ ID NO: 5405 - DNA, 25 bp, Artificial Sequence
  Synthetic Oligonucleotide
acgaatatccatgtaggtctcagaa

SEQ ID NO: 5406 - DNA, 25 bp, Artificial Sequence
  Synthetic Oligonucleotide
agaatacgccattatcgatagcaaa

SEQ ID NO: 5407 - DNA, 25 bp, Artificial Sequence
  Synthetic Oligonucleotide
aaacccgaagtcagagtagtctaaa

SEQ ID NO: 5408 - DNA, 25 bp, Artificial Sequence
  Synthetic Oligonucleotide
acgcgagtcctcgtcgttactagaa

SEQ ID NO: 5409 - DNA, 25 bp, Artificial Sequence
  Synthetic Oligonucleotide
taacggacttctgctctgtaacgaa

SEQ ID NO: 5410 - DNA, 25 bp, Artificial Sequence
  Synthetic Oligonucleotide
agaggaggtacaacgtccgtaacca

SEQ ID NO: 5411 - DNA, 25 bp, Artificial Sequence
  Synthetic Oligonucleotide
cgagagtcgggatcctaccactcca

SEQ ID NO: 5412 - DNA, 25 bp, Artificial Sequence
  Synthetic Oligonucleotide
acgtaagaagacatcctcgccttca

SEQ ID NO: 5413 - DNA, 25 bp, Artificial Sequence
  Synthetic Oligonucleotide
agcgggcacgtgacgcgcgccttca

SEQ ID NO: 5414 - DNA, 25 bp, Artificial Sequence
  Synthetic Oligonucleotide
tgtgccgctctgacgccgattcaca

SEQ ID NO: 5415 - DNA, 25 bp, Artificial Sequence
  Synthetic Oligonucleotide
gtgtcgggatctttcccgatgccgg

SEQ ID NO: 5416 - DNA, 25 bp, Artificial Sequence
  Synthetic Oligonucleotide
tgtcgggatctaacccgatgccggg

SEQ ID NO: 5417 - DNA, 25 bp, Artificial Sequence
  Synthetic Oligonucleotide
ctgtagattcccctagtgtctggac

SEQ ID NO: 5418 - DNA, 25 bp, Artificial Sequence
  Synthetic Oligonucleotide
aacgttaagttctcgctaatcccag

SEQ ID NO: 5419 - DNA, 25 bp, Artificial Sequence
  Synthetic Oligonucleotide
gcgtgaagtacttcctcaacttcca

SEQ ID NO: 5420 - DNA, 25 bp, Artificial Sequence
  Synthetic Oligonucleotide
cgagtgagagactccacaagaagca

SEQ ID NO: 5421 - DNA, 25 bp, Artificial Sequence
  Synthetic Oligonucleotide
gctagtggaacacctccaagcccga

SEQ ID NO: 5422 - DNA, 25 bp, Artificial Sequence
  Synthetic Oligonucleotide
cttgtcgaactataaaagtccctag

SEQ ID NO: 5423 - DNA, 25 bp, Artificial Sequence
  Synthetic Oligonucleotide
tttgagtcgaaatagattgacccac

SEQ ID NO: 5424 - DNA, 25 bp, Artificial Sequence
  Synthetic Oligonucleotide
gagcgagacagccggtccgacctca

SEQ ID NO: 5425 - DNA, 25 bp, Artificial Sequence
  Synthetic Oligonucleotide
gcgtcgagtaacttcttccacacca

SEQ ID NO: 5426 - DNA, 25 bp, Artificial Sequence
  Synthetic Oligonucleotide
ggtcgtttctagaccgcgacgacca

SEQ ID NO: 5427 - DNA, 25 bp, Artificial Sequence
  Synthetic Oligonucleotide
ggtcgtttctagaccgcgacgacca

SEQ ID NO: 5428 - DNA, 25 bp, Artificial Sequence
  Synthetic Oligonucleotide
ggtcgcttctacacggcgacgacca

SEQ ID NO: 5429 - DNA, 25 bp, Artificial Sequence
  Synthetic Oligonucleotide
cagcagttctacgatggcaagtcct

SEQ ID NO: 5430 - DNA, 25 bp, Artificial Sequence
  Synthetic Oligonucleotide
aggacttgccatcgtagaactgctg

SEQ ID NO: 5431 - DNA, 25 bp, Artificial Sequence
  Synthetic Oligonucleotide
tcaaaggggcacaactcagtttaat

SEQ ID NO: 5432 - DNA, 25 bp, Artificial Sequence
  Synthetic Oligonucleotide
tcaaaggggcacaactcagtttaat

SEQ ID NO: 5433 - DNA, 25 bp, Artificial Sequence
  Synthetic Oligonucleotide
tcaaaggggcacaactcagtttaat

SEQ ID NO: 5434 - DNA, 25 bp, Artificial Sequence
  Synthetic Oligonucleotide
agagtgggtcccttaagtttacgag

SEQ ID NO: 5435 - DNA, 25 bp, Artificial Sequence
  Synthetic Oligonucleotide
ggggctgactcggactaatttagag

SEQ ID NO: 5436 - DNA, 25 bp, Artificial Sequence
  Synthetic Oligonucleotide
cgtgagcgtcatggagtagctgcaa

SEQ ID NO: 5437 - DNA, 25 bp, Artificial Sequence
  Synthetic Oligonucleotide
gtggtcgtacaactaaccgtgcgaa

SEQ ID NO: 5438 - DNA, 25 bp, Artificial Sequence
  Synthetic Oligonucleotide
tgtgaggtctggtcccgtagtctaa

SEQ ID NO: 5439 - DNA, 25 bp, Artificial Sequence
  Synthetic Oligonucleotide
gtcgaggtaccgactcctgaatgac

SEQ ID NO: 5440 - DNA, 25 bp, Artificial Sequence
  Synthetic Oligonucleotide
taagtacgcgcagtgattaatctac

SEQ ID NO: 5441 - DNA, 25 bp, Artificial Sequence
  Synthetic Oligonucleotide
ttcgacgacggatttctgtagatca

SEQ ID NO: 5442 - DNA, 25 bp, Artificial Sequence
  Synthetic Oligonucleotide
ggtggctcggacttcctgtgagtca

SEQ ID NO: 5443 - DNA, 25 bp, Artificial Sequence
  Synthetic Oligonucleotide
tggggagtcagcttcttgttctaca

SEQ ID NO: 5444 - DNA, 25 bp, Artificial Sequence
  Synthetic Oligonucleotide
ccccggagccactcgtcgtgtccca

SEQ ID NO: 5445 - DNA, 25 bp, Artificial Sequence
  Synthetic Oligonucleotide
ctcaggagtcaacactcggtgaaca

SEQ ID NO: 5446 - DNA, 25 bp, Artificial Sequence
  Synthetic Oligonucleotide
ctaagatagccagacgggagaacgc

SEQ ID NO: 5447 - DNA, 25 bp, Artificial Sequence
  Synthetic Oligonucleotide
ctagcggtcccagaccaggtagaac

SEQ ID NO: 5448 - DNA, 25 bp, Artificial Sequence
  Synthetic Oligonucleotide
ctcctgccgctattgtcgaggagaa

SEQ ID NO: 5449 - DNA, 25 bp, Artificial Sequence
  Synthetic Oligonucleotide
ccggtcgcgttgttggagctacgca

SEQ ID NO: 5450 - DNA, 25 bp, Artificial Sequence
  Synthetic Oligonucleotide
gaccgccacgttggtggaactagaa

SEQ ID NO: 5451 - DNA, 17 bp, Artificial Sequence
  Synthetic Oligonucleotide
cagttctacgatggcaa

SEQ ID NO: 5452 - DNA, 17 bp, Artificial Sequence
  Synthetic Oligonucleotide
ttgccatcgtagaactg

SEQ ID NO: 5453 - DNA, 17 bp, Artificial Sequence
  Synthetic Oligonucleotide
cagttctacgatggcaa

SEQ ID NO: 5454 - DNA, 17 bp, Artificial Sequence
  Synthetic Oligonucleotide
ttgccatcgtagaactg

SEQ ID NO: 5455 - DNA, 17 bp, Artificial Sequence
  Synthetic Oligonucleotide
agttctacgatggcaag

SEQ ID NO: 5456 - DNA, 17 bp, Artificial Sequence
  Synthetic Oligonucleotide
cttgccatcgtagaact

SEQ ID NO: 5457 - DNA, 17 bp, Artificial Sequence
  Synthetic Oligonucleotide
agttctacgatggcaag

SEQ ID NO: 5458 - DNA, 17 bp, Artificial Sequence
  Synthetic Oligonucleotide
cttgccatcgtagaact

SEQ ID NO: 5459 - DNA, 17 bp, Artificial Sequence
  Synthetic Oligonucleotide
gttctacgatggcaagt

SEQ ID NO: 5460 - DNA, 17 bp, Artificial Sequence
  Synthetic Oligonucleotide
acttgccatcgtagaac

SEQ ID NO: 5461 - DNA, 17 bp, Artificial Sequence
  Synthetic Oligonucleotide
gttctacgatggcaagt

SEQ ID NO: 5462 - DNA, 17 bp, Artificial Sequence
  Synthetic Oligonucleotide
acttgccatcgtagaac

SEQ ID NO: 5463 - DNA, 17 bp, Artificial Sequence
  Synthetic Oligonucleotide
ttctacgatggcaagtc

SEQ ID NO: 5464 - DNA, 17 bp, Artificial Sequence
  Synthetic Oligonucleotide
gacttgccatcgtagaa

SEQ ID NO: 5465 - DNA, 17 bp, Artificial Sequence
  Synthetic Oligonucleotide
ttctacgatggcaagtc

SEQ ID NO: 5466 - DNA, 17 bp, Artificial Sequence
  Synthetic Oligonucleotide
gacttgccatcgtagaa

SEQ ID NO: 5467 - DNA, 25 bp, Artificial Sequence
  Synthetic Oligonucleotide
tagcgccgtgccagtagtcatccca

SEQ ID NO: 5468 - DNA, 25 bp, Artificial Sequence
  Synthetic Oligonucleotide
atgcatgcgcgcatgcacgcacgca

SEQ ID NO: 5469 - DNA, 25 bp, Artificial Sequence
  Synthetic Oligonucleotide
gctagaacggcgtcagacgctagca

SEQ ID NO: 5470 - DNA, 25 bp, Artificial Sequence
  Synthetic Oligonucleotide
gtgcgaaagcgtgtagtcgcagtca

SEQ ID NO: 5471 - DNA, 25 bp, Artificial Sequence
  Synthetic Oligonucleotide
tcgtccaagacgaccgcgtcgaaca

SEQ ID NO: 5472 - DNA, 25 bp, Artificial Sequence
  Synthetic Oligonucleotide
cgccactagaggaagacgtacgcca

SEQ ID NO: 5473 - DNA, 25 bp, Artificial Sequence
  Synthetic Oligonucleotide
acgcattaggtcgacgtccgacgac

SEQ ID NO: 5474 - DNA, 25 bp, Artificial Sequence
  Synthetic Oligonucleotide
cacgcatgaatctgtacgtaccgaa

SEQ ID NO: 5475 - DNA, 25 bp, Artificial Sequence
  Synthetic Oligonucleotide
ccaaagagatatatcagaaccgaca

SEQ ID NO: 5476 - DNA, 25 bp, Artificial Sequence
  Synthetic Oligonucleotide
aaaatgaatgccagaacgtgacgac

SEQ ID NO: 5477 - DNA, 25 bp, Artificial Sequence
  Synthetic Oligonucleotide
ataaataaatctgtgacatcgacag

SEQ ID NO: 5478 - DNA, 25 bp, Artificial Sequence
  Synthetic Oligonucleotide
aatatacattcatgtgacatcgaca

SEQ ID NO: 5479 - DNA, 25 bp, Artificial Sequence
  Synthetic Oligonucleotide
gaacatactttgtcggaagtcgaac

SEQ ID NO: 5480 - DNA, 25 bp, Artificial Sequence
  Synthetic Oligonucleotide
gatacagacattactaattgtgcat

SEQ ID NO: 5481 - DNA, 25 bp, Artificial Sequence
  Synthetic Oligonucleotide
gagcagacttacttctaccttggaa

SEQ ID NO: 5482 - DNA, 25 bp, Artificial Sequence
  Synthetic Oligonucleotide
aacttgatagtaacttagtcgtaac

SEQ ID NO: 5483 - DNA, 25 bp, Artificial Sequence
  Synthetic Oligonucleotide
acttagtaacgctgactactcttac

SEQ ID NO: 5484 - DNA, 25 bp, Artificial Sequence
  Synthetic Oligonucleotide
tcatcccttagaagccgttacctgc

SEQ ID NO: 5485 - DNA, 25 bp, Artificial Sequence
  Synthetic Oligonucleotide
gtactgcccttgagactctttttac

SEQ ID NO: 5486 - DNA, 25 bp, Artificial Sequence
  Synthetic Oligonucleotide
gtactgtcatcttttggttttaaac

SEQ ID NO: 5487 - DNA, 25 bp, Artificial Sequence
  Synthetic Oligonucleotide
gcggtcgattccagggtttcaacac

SEQ ID NO: 5488 - DNA, 25 bp, Artificial Sequence
  Synthetic Oligonucleotide
tcatcgtacgtcagggtgttgaaca

SEQ ID NO: 5489 - DNA, 25 bp, Artificial Sequence
  Synthetic Oligonucleotide
aatctactcgatggaagttctggaa

SEQ ID NO: 5490 - DNA, 25 bp, Artificial Sequence
  Synthetic Oligonucleotide
acacctaatgactgatctcttagaa

SEQ ID NO: 5491 - DNA, 25 bp, Artificial Sequence
  Synthetic Oligonucleotide
acgtagaattgttgatcccgtagaa

SEQ ID NO: 5492 - DNA, 25 bp, Artificial Sequence
  Synthetic Oligonucleotide
aagtagacgttttcgtctcctgaaa

SEQ ID NO: 5493 - DNA, 25 bp, Artificial Sequence
  Synthetic Oligonucleotide
tgaagatacgtatcccttttcgaaa

SEQ ID NO: 5494 - DNA, 25 bp, Artificial Sequence
  Synthetic Oligonucleotide
agtacgcgtaaagctgtttcttgac

SEQ ID NO: 5495 - DNA, 25 bp, Artificial Sequence
  Synthetic Oligonucleotide
atgcgtactactgtcgtcgttttgc

SEQ ID NO: 5496 - DNA, 25 bp, Artificial Sequence
  Synthetic Oligonucleotide
ataggcacttaccgtcgtgctggac

SEQ ID NO: 5497 - DNA, 25 bp, Artificial Sequence
  Synthetic Oligonucleotide
agtaccacgatcctcggtctcgtca

SEQ ID NO: 5498 - DNA, 25 bp, Artificial Sequence
  Synthetic Oligonucleotide
ccgttctacgcagtcgtgatgtaag

SEQ ID NO: 5499 - DNA, 25 bp, Artificial Sequence
  Synthetic Oligonucleotide
gaaccgtttacgaaagcgtcatcaa

SEQ ID NO: 5500 - DNA, 25 bp, Artificial Sequence
  Synthetic Oligonucleotide
gtgagacctttcatcaacgaccaaa

SEQ ID NO: 5501 - DNA, 25 bp, Artificial Sequence
  Synthetic Oligonucleotide
tagactcttatgaacccgttcaaag

SEQ ID NO: 5502 - DNA, 25 bp, Artificial Sequence
  Synthetic Oligonucleotide
agggtcttaggtaagccggtttaac

SEQ ID NO: 5503 - DNA, 25 bp, Artificial Sequence
  Synthetic Oligonucleotide
ggtgcgttgttactgcggtgtttac

SEQ ID NO: 5504 - DNA, 25 bp, Artificial Sequence
  Synthetic Oligonucleotide
tggtcgtttacgatcgtggtgataa

SEQ ID NO: 5505 - DNA, 25 bp, Artificial Sequence
  Synthetic Oligonucleotide
gtagtagcttaaccgtgagtttaca

SEQ ID NO: 5506 - DNA, 25 bp, Artificial Sequence
  Synthetic Oligonucleotide
cgtagacggaagcgtcggagtatca

SEQ ID NO: 5507 - DNA, 25 bp, Artificial Sequence
  Synthetic Oligonucleotide
cagacgcgttagtcgaggagtcaag

SEQ ID NO: 5508 - DNA, 25 bp, Artificial Sequence
  Synthetic Oligonucleotide
ccagacgcgttagtcgaggagtcaa

SEQ ID NO: 5509 - DNA, 25 bp, Artificial Sequence
  Synthetic Oligonucleotide
acaactacgtgtagaccgggaccaa

SEQ ID NO: 5510 - DNA, 25 bp, Artificial Sequence
  Synthetic Oligonucleotide
tacaacacagtttcctgtgacgcaa

SEQ ID NO: 5511 - DNA, 25 bp, Artificial Sequence
  Synthetic Oligonucleotide
cttaaaaagtaagtcggtgaccgaa

SEQ ID NO: 5512 - DNA, 25 bp, Artificial Sequence
  Synthetic Oligonucleotide
aggttgaaaaagtgcgttaaccaac

SEQ ID NO: 5513 - DNA, 25 bp, Artificial Sequence
  Synthetic Oligonucleotide
gtttagagatggccggtttagctaa

SEQ ID NO: 5514 - DNA, 25 bp, Artificial Sequence
  Synthetic Oligonucleotide
ggacaactgcgcgtgtattagcaca

SEQ ID NO: 5515 - DNA, 25 bp, Artificial Sequence
  Synthetic Oligonucleotide
caggtcaaagaggctgttgaaagag

SEQ ID NO: 5516 - DNA, 25 bp, Artificial Sequence
  Synthetic Oligonucleotide
aggcaaaactgtacttcgagttaag

SEQ ID NO: 5517 - DNA, 25 bp, Artificial Sequence
  Synthetic Oligonucleotide
gttccacatcttctagtcgagtcaa

SEQ ID NO: 5518 - DNA, 25 bp, Artificial Sequence
  Synthetic Oligonucleotide
ttccagagtttgtactagacccagt

SEQ ID NO: 5519 - DNA, 25 bp, Artificial Sequence
  Synthetic Oligonucleotide
ccagaagagtaggaactagaactca

SEQ ID NO: 5520 - DNA, 25 bp, Artificial Sequence
  Synthetic Oligonucleotide
ccagtcctatagcaactacgggtca

SEQ ID NO: 5521 - DNA, 25 bp, Artificial Sequence
  Synthetic Oligonucleotide
accacgtaccaacagcagtcgagca

SEQ ID NO: 5522 - DNA, 25 bp, Artificial Sequence
  Synthetic Oligonucleotide
acgacgtaccgacagcagtcgagca

SEQ ID NO: 5523 - DNA, 25 bp, Artificial Sequence
  Synthetic Oligonucleotide
acatacataagaccgagtcgacgaa

SEQ ID NO: 5524 - DNA, 25 bp, Artificial Sequence
  Synthetic Oligonucleotide
cgctaactaagaagccgactactaa

SEQ ID NO: 5525 - DNA, 25 bp, Artificial Sequence
  Synthetic Oligonucleotide
agcgcaacctaaagtctagttacaa

SEQ ID NO: 5526 - DNA, 25 bp, Artificial Sequence
  Synthetic Oligonucleotide
ccgtccctgcattagttacgctcaa

SEQ ID NO: 5527 - DNA, 25 bp, Artificial Sequence
  Synthetic Oligonucleotide
tggtctgctgcgtctatgggtccat

SEQ ID NO: 5528 - DNA, 25 bp, Artificial Sequence
  Synthetic Oligonucleotide
gctctagtctgctctagcccgcgca

SEQ ID NO: 5529 - DNA, 25 bp, Artificial Sequence
  Synthetic Oligonucleotide
gtatagactcttgtagacccgttca

SEQ ID NO: 5530 - DNA, 25 bp, Artificial Sequence
  Synthetic Oligonucleotide
gatagtaacttagtcgtaaccatca

SEQ ID NO: 5531 - DNA, 25 bp, Artificial Sequence
  Synthetic Oligonucleotide
ataagacgtaatgcccgtacatcgc

SEQ ID NO: 5532 - DNA, 25 bp, Artificial Sequence
  Synthetic Oligonucleotide
cgtaaaagtgtatctggggacatca

SEQ ID NO: 5533 - DNA, 25 bp, Artificial Sequence
  Synthetic Oligonucleotide
aataacagtgatggagggacttaat

SEQ ID NO: 5534 - DNA, 25 bp, Artificial Sequence
  Synthetic Oligonucleotide
aatcagagtcgattgagtgaaccaa

SEQ ID NO: 5535 - DNA, 25 bp, Artificial Sequence
  Synthetic Oligonucleotide
gtttctacaatactggtgctaccaa

SEQ ID NO: 5536 - DNA, 25 bp, Artificial Sequence
  Synthetic Oligonucleotide
atctcaagaagaggttcgtacctca

SEQ ID NO: 5537 - DNA, 25 bp, Artificial Sequence
  Synthetic Oligonucleotide
cgtgtaggtagaggcacgtaccgca

SEQ ID NO: 5538 - DNA, 25 bp, Artificial Sequence
  Synthetic Oligonucleotide
ggtacacgagcgccgactcgtcgaa

SEQ ID NO: 5539 - DNA, 25 bp, Artificial Sequence
  Synthetic Oligonucleotide
cggggtctacacaccactcgtgtca

SEQ ID NO: 5540 - DNA, 25 bp, Artificial Sequence
  Synthetic Oligonucleotide
ggcggcgtagcggtcagccgtagca

SEQ ID NO: 5541 - DNA, 25 bp, Artificial Sequence
  Synthetic Oligonucleotide
ggtgggctagggatcagccgtatca

SEQ ID NO: 5542 - DNA, 25 bp, Artificial Sequence
  Synthetic Oligonucleotide
gtggggactcggactcatggtccac

SEQ ID NO: 5543 - DNA, 25 bp, Artificial Sequence
  Synthetic Oligonucleotide
atttccggatggtccgatggcagct

SEQ ID NO: 5544 - DNA, 25 bp, Artificial Sequence
  Synthetic Oligonucleotide
atctctctttggtcgcatttaacct

SEQ ID NO: 5545 - DNA, 25 bp, Artificial Sequence
  Synthetic Oligonucleotide
agtcttgtattgtccactttgtgct

SEQ ID NO: 5546 - DNA, 25 bp, Artificial Sequence
  Synthetic Oligonucleotide
tgtgtagtagtcatcccattttgat

SEQ ID NO: 5547 - DNA, 25 bp, Artificial Sequence
  Synthetic Oligonucleotide
tagttagtacgcaaacccacttgca

SEQ ID NO: 5548 - DNA, 25 bp, Artificial Sequence
  Synthetic Oligonucleotide
gtgactcgatagtatccactccgca

SEQ ID NO: 5549 - DNA, 25 bp, Artificial Sequence
  Synthetic Oligonucleotide
catgtgcaatatttgtaacacagcc

SEQ ID NO: 5550 - DNA, 25 bp, Artificial Sequence
  Synthetic Oligonucleotide
gtcgagtaacatctttcacaccacg

SEQ ID NO: 5551 - DNA, 25 bp, Artificial Sequence
  Synthetic Oligonucleotide
gcgacctcgagtctgtctcgggcac

SEQ ID NO: 5552 - DNA, 25 bp, Artificial Sequence
  Synthetic Oligonucleotide
gcgactacacccgctcgtggaacac

SEQ ID NO: 5553 - DNA, 25 bp, Artificial Sequence
  Synthetic Oligonucleotide
tactgcgcaacgaccccggattaca

SEQ ID NO: 5554 - DNA, 25 bp, Artificial Sequence
  Synthetic Oligonucleotide
ctgtgccgctctgtcgccgattcac

SEQ ID NO: 5555 - DNA, 25 bp, Artificial Sequence
  Synthetic Oligonucleotide
aggacttgccatcgtagaactgctg

SEQ ID NO: 5556 - DNA, 25 bp, Artificial Sequence
  Synthetic Oligonucleotide
cagcagttctacgatggcaagtcct

SEQ ID NO: 5557 - DNA, 25 bp, Artificial Sequence
  Synthetic Oligonucleotide
tcaaaggggcactactcagtttaat

SEQ ID NO: 5558 - DNA, 25 bp, Artificial Sequence
  Synthetic Oligonucleotide
tcaaaggggcactactcagtttaat

SEQ ID NO: 5559 - DNA, 25 bp, Artificial Sequence
  Synthetic Oligonucleotide
tcaaaggggcactactcagtttaat

SEQ ID NO: 5560 - DNA, 25 bp, Artificial Sequence
  Synthetic Oligonucleotide
agagtgggtcccataagtttacgag

SEQ ID NO: 5561 - DNA, 25 bp, Artificial Sequence
  Synthetic Oligonucleotide
ggggctgactcgcactaatttagag

SEQ ID NO: 5562 - DNA, 25 bp, Artificial Sequence
  Synthetic Oligonucleotide
cgtgagcgtcatcgagtagctgcaa

SEQ ID NO: 5563 - DNA, 25 bp, Artificial Sequence
  Synthetic Oligonucleotide
gtggtcgtacaagtaaccgtgcgaa

SEQ ID NO: 5564 - DNA, 25 bp, Artificial Sequence
  Synthetic Oligonucleotide
tgtgaggtctggacccgtagtctaa

SEQ ID NO: 5565 - DNA, 25 bp, Artificial Sequence
  Synthetic Oligonucleotide
gtcgaggtaccgtctcctgaatgac

SEQ ID NO: 5566 - DNA, 25 bp, Artificial Sequence
  Synthetic Oligonucleotide
taagtacgcgcactgattaatctac

SEQ ID NO: 5567 - DNA, 25 bp, Artificial Sequence
  Synthetic Oligonucleotide
ttcgacgacggaattctgtagatca

SEQ ID NO: 5568 - DNA, 25 bp, Artificial Sequence
  Synthetic Oligonucleotide
ggtggctcggacatcctgtgagtca

SEQ ID NO: 5569 - DNA, 25 bp, Artificial Sequence
  Synthetic Oligonucleotide
tggggagtcagcatcttgttctaca

SEQ ID NO: 5570 - DNA, 25 bp, Artificial Sequence
  Synthetic Oligonucleotide
ccccggagccacacgtcgtgtccca

SEQ ID NO: 5571 - DNA, 25 bp, Artificial Sequence
  Synthetic Oligonucleotide
ctcaggagtcaagactcggtgaaca

SEQ ID NO: 5572 - DNA, 25 bp, Artificial Sequence
  Synthetic Oligonucleotide
ctaagatagccacacgggagaacgc

SEQ ID NO: 5573 - DNA, 25 bp, Artificial Sequence
  Synthetic Oligonucleotide
ctagcggtcccacaccaggtagaac

SEQ ID NO: 5574 - DNA, 25 bp, Artificial Sequence
  Synthetic Oligonucleotide
ctcctgccgctaatgtcgaggagaa

SEQ ID NO: 5575 - DNA, 25 bp, Artificial Sequence
  Synthetic Oligonucleotide
ccggtcgcgttgatggagctacgca

SEQ ID NO: 5576 - DNA, 25 bp, Artificial Sequence
  Synthetic Oligonucleotide
gaccgccacgttcgtggaactagaa

SEQ ID NO: 5577 - DNA, 17 bp, Artificial Sequence
  Synthetic Oligonucleotide
ttgccatcgtagaactg

SEQ ID NO: 5578 - DNA, 17 bp, Artificial Sequence
  Synthetic Oligonucleotide
cagttctacgatggcaa

SEQ ID NO: 5579 - DNA, 17 bp, Artificial Sequence
  Synthetic Oligonucleotide
ttgccatcgtagaactg

SEQ ID NO: 5580 - DNA, 17 bp, Artificial Sequence
  Synthetic Oligonucleotide
cagttctacgatggcaa

SEQ ID NO: 5581 - DNA, 17 bp, Artificial Sequence
  Synthetic Oligonucleotide
cttgccatcgtagaact

SEQ ID NO: 5582 - DNA, 17 bp, Artificial Sequence
  Synthetic Oligonucleotide
agttctacgatggcaag

SEQ ID NO: 5583 - DNA, 17 bp, Artificial Sequence
  Synthetic Oligonucleotide
cttgccatcgtagaact

SEQ ID NO: 5584 - DNA, 17 bp, Artificial Sequence
  Synthetic Oligonucleotide
agttctacgatggcaag

SEQ ID NO: 5585 - DNA, 17 bp, Artificial Sequence
  Synthetic Oligonucleotide
acttgccatcgtagaac

SEQ ID NO: 5586 - DNA, 17 bp, Artificial Sequence
  Synthetic Oligonucleotide
gttctacgatggcaagt

SEQ ID NO: 5587 - DNA, 17 bp, Artificial Sequence
  Synthetic Oligonucleotide
acttgccatcgtagaac

SEQ ID NO: 5588 - DNA, 17 bp, Artificial Sequence
  Synthetic Oligonucleotide
gttctacgatggcaagt

SEQ ID NO: 5589 - DNA, 17 bp, Artificial Sequence
  Synthetic Oligonucleotide
gacttgccatcgtagaa

SEQ ID NO: 5590 - DNA, 17 bp, Artificial Sequence
  Synthetic Oligonucleotide
ttctacgatggcaagtc

SEQ ID NO: 5591 - DNA, 17 bp, Artificial Sequence
  Synthetic Oligonucleotide
gacttgccatcgtagaa

SEQ ID NO: 5592 - DNA, 17 bp, Artificial Sequence
  Synthetic Oligonucleotide
ttctacgatggcaagtc

SEQ ID NO: 5593 - DNA, 25 bp, Artificial Sequence
  Synthetic Oligonucleotide
tagcgccgtgcctgtagtcatccca

SEQ ID NO: 5594 - DNA, 25 bp, Artificial Sequence
  Synthetic Oligonucleotide
atgcatgcgcgcttgcacgcacgca

SEQ ID NO: 5595 - DNA, 25 bp, Artificial Sequence
  Synthetic Oligonucleotide
gctagaacggcgacagacgctagca

SEQ ID NO: 5596 - DNA, 25 bp, Artificial Sequence
  Synthetic Oligonucleotide
gtgcgaaagcgtctagtcgcagtca

SEQ ID NO: 5597 - DNA, 25 bp, Artificial Sequence
  Synthetic Oligonucleotide
tcgtccaagacgtccgcgtcgaaca

SEQ ID NO: 5598 - DNA, 25 bp, Artificial Sequence
  Synthetic Oligonucleotide
cgccactagaggtagacgtacgcca

SEQ ID NO: 5599 - DNA, 25 bp, Artificial Sequence
  Synthetic Oligonucleotide
acgcattaggtccacgtccgacgac

SEQ ID NO: 5600 - DNA, 25 bp, Artificial Sequence
  Synthetic Oligonucleotide
cacgcatgaatcagtacgtaccgaa

SEQ ID NO: 5601 - DNA, 25 bp, Artificial Sequence
  Synthetic Oligonucleotide
ccaaagagatatttcagaaccgaca

SEQ ID NO: 5602 - DNA, 25 bp, Artificial Sequence
  Synthetic Oligonucleotide
aaaatgaatgcctgaacgtgacgac

SEQ ID NO: 5603 - DNA, 25 bp, Artificial Sequence
  Synthetic Oligonucleotide
ataaataaatctctgacatcgacag

SEQ ID NO: 5604 - DNA, 25 bp, Artificial Sequence
  Synthetic Oligonucleotide
aatatacattcaagtgacatcgaca

SEQ ID NO: 5605 - DNA, 25 bp, Artificial Sequence
  Synthetic Oligonucleotide
gaacatactttgacggaagtcgaac

SEQ ID NO: 5606 - DNA, 25 bp, Artificial Sequence
  Synthetic Oligonucleotide
gatacagacatttctaattgtgcat

SEQ ID NO: 5607 - DNA, 25 bp, Artificial Sequence
  Synthetic Oligonucleotide
gagcagacttacatctaccttggaa

SEQ ID NO: 5608 - DNA, 25 bp, Artificial Sequence
  Synthetic Oligonucleotide
aacttgatagtatcttagtcgtaac

SEQ ID NO: 5609 - DNA, 25 bp, Artificial Sequence
  Synthetic Oligonucleotide
acttagtaacgcagactactcttac

SEQ ID NO: 5610 - DNA, 25 bp, Artificial Sequence
  Synthetic Oligonucleotide
tcatcccttagatgccgttacctgc

SEQ ID NO: 5611 - DNA, 25 bp, Artificial Sequence
  Synthetic Oligonucleotide
gtactgcccttgtgactctttttac

SEQ ID NO: 5612 - DNA, 25 bp, Artificial Sequence
  Synthetic Oligonucleotide
gtactgtcatctattggttttaaac

SEQ ID NO: 5613 - DNA, 25 bp, Artificial Sequence
  Synthetic Oligonucleotide
gcggtcgattcctgggtttcaacac

SEQ ID NO: 5614 - DNA, 25 bp, Artificial Sequence
  Synthetic Oligonucleotide
tcatcgtacgtctgggtgttgaaca

SEQ ID NO: 5615 - DNA, 25 bp, Artificial Sequence
  Synthetic Oligonucleotide
aatctactcgatcgaagttctggaa

SEQ ID NO: 5616 - DNA, 25 bp, Artificial Sequence
  Synthetic Oligonucleotide
acacctaatgacagatctcttagaa

SEQ ID NO: 5617 - DNA, 25 bp, Artificial Sequence
  Synthetic Oligonucleotide
acgtagaattgtagatcccgtagaa

SEQ ID NO: 5618 - DNA, 25 bp, Artificial Sequence
  Synthetic Oligonucleotide
aagtagacgtttacgtctcctgaaa

SEQ ID NO: 5619 - DNA, 25 bp, Artificial Sequence
  Synthetic Oligonucleotide
tgaagatacgtaacccttttcgaaa

SEQ ID NO: 5620 - DNA, 25 bp, Artificial Sequence
  Synthetic Oligonucleotide
agtacgcgtaaacctgtttcttgac

SEQ ID NO: 5621 - DNA, 25 bp, Artificial Sequence
  Synthetic Oligonucleotide
atgcgtactactctcgtcgttttgc

SEQ ID NO: 5622 - DNA, 25 bp, Artificial Sequence
  Synthetic Oligonucleotide
ataggcacttacggtcgtgctggac

SEQ ID NO: 5623 - DNA, 25 bp, Artificial Sequence
  Synthetic Oligonucleotide
agtaccacgatcgtcggtctcgtca

SEQ ID NO: 5624 - DNA, 25 bp, Artificial Sequence
  Synthetic Oligonucleotide
ccgttctacgcactcgtgatgtaag

SEQ ID NO: 5625 - DNA, 25 bp, Artificial Sequence
  Synthetic Oligonucleotide
gaaccgtttacgtaagcgtcatcaa

SEQ ID NO: 5626 - DNA, 25 bp, Artificial Sequence
  Synthetic Oligonucleotide
gtgagacctttcttcaacgaccaaa

SEQ ID NO: 5627 - DNA, 25 bp, Artificial Sequence
  Synthetic Oligonucleotide
tagactcttatgtacccgttcaaag

SEQ ID NO: 5628 - DNA, 25 bp, Artificial Sequence
  Synthetic Oligonucleotide
agggtcttaggttagccggtttaac

SEQ ID NO: 5629 - DNA, 25 bp, Artificial Sequence
  Synthetic Oligonucleotide
ggtgcgttgttagtgcggtgtttac

SEQ ID NO: 5630 - DNA, 25 bp, Artificial Sequence
  Synthetic Oligonucleotide
tggtcgtttacgttcgtggtgataa

SEQ ID NO: 5631 - DNA, 25 bp, Artificial Sequence
  Synthetic Oligonucleotide
gtagtagcttaagcgtgagtttaca

SEQ ID NO: 5632 - DNA, 25 bp, Artificial Sequence
  Synthetic Oligonucleotide
cgtagacggaagggtcggagtatca

SEQ ID NO: 5633 - DNA, 25 bp, Artificial Sequence
  Synthetic Oligonucleotide
cagacgcgttagacgaggagtcaag

SEQ ID NO: 5634 - DNA, 25 bp, Artificial Sequence
  Synthetic Oligonucleotide
ccagacgcgttactcgaggagtcaa

SEQ ID NO: 5635 - DNA, 25 bp, Artificial Sequence
  Synthetic Oligonucleotide
acaactacgtgttgaccgggaccaa

SEQ ID NO: 5636 - DNA, 25 bp, Artificial Sequence
  Synthetic Oligonucleotide
tacaacacagttacctgtgacgcaa

SEQ ID NO: 5637 - DNA, 25 bp, Artificial Sequence
  Synthetic Oligonucleotide
cttaaaaagtaactcggtgaccgaa

SEQ ID NO: 5638 - DNA, 25 bp, Artificial Sequence
  Synthetic Oligonucleotide
aggttgaaaaagagcgttaaccaac

SEQ ID NO: 5639 - DNA, 25 bp, Artificial Sequence
  Synthetic Oligonucleotide
gtttagagatgggcggtttagctaa

SEQ ID NO: 5640 - DNA, 25 bp, Artificial Sequence
  Synthetic Oligonucleotide
ggacaactgcgcctgtattagcaca

SEQ ID NO: 5641 - DNA, 25 bp, Artificial Sequence
  Synthetic Oligonucleotide
caggtcaaagagcctgttgaaagag

SEQ ID NO: 5642 - DNA, 25 bp, Artificial Sequence
  Synthetic Oligonucleotide
aggcaaaactgttcttcgagttaag

SEQ ID NO: 5643 - DNA, 25 bp, Artificial Sequence
  Synthetic Oligonucleotide
gttccacatcttgtagtcgagtcaa

SEQ ID NO: 5644 - DNA, 25 bp, Artificial Sequence
  Synthetic Oligonucleotide
ttccagagtttgaactagacccagt

SEQ ID NO: 5645 - DNA, 25 bp, Artificial Sequence
  Synthetic Oligonucleotide
ccagaagagtagcaactagaactca

SEQ ID NO: 5646 - DNA, 25 bp, Artificial Sequence
  Synthetic Oligonucleotide
ccagtcctataggaactacgggtca

SEQ ID NO: 5647 - DNA, 25 bp, Artificial Sequence
  Synthetic Oligonucleotide
accacgtaccaagagcagtcgagca

SEQ ID NO: 5648 - DNA, 25 bp, Artificial Sequence
  Synthetic Oligonucleotide
acgacgtaccgagagcagtcgagca

SEQ ID NO: 5649 - DNA, 25 bp, Artificial Sequence
  Synthetic Oligonucleotide
acatacataagagcgagtcgacgaa

SEQ ID NO: 5650 - DNA, 25 bp, Artificial Sequence
  Synthetic Oligonucleotide
cgctaactaagatgccgactactaa

SEQ ID NO: 5651 - DNA, 25 bp, Artificial Sequence
  Synthetic Oligonucleotide
agcgcaacctaatgtctagttacaa

SEQ ID NO: 5652 - DNA, 25 bp, Artificial Sequence
  Synthetic Oligonucleotide
ccgtccctgcataagttacgctcaa

SEQ ID NO: 5653 - DNA, 25 bp, Artificial Sequence
  Synthetic Oligonucleotide
tggtctgctgcgactatgggtccat

SEQ ID NO: 5654 - DNA, 25 bp, Artificial Sequence
  Synthetic Oligonucleotide
gctctagtctgcactagcccgcgca

SEQ ID NO: 5655 - DNA, 25 bp, Artificial Sequence
  Synthetic Oligonucleotide
gtatagactcttctagacccgttca

SEQ ID NO: 5656 - DNA, 25 bp, Artificial Sequence
  Synthetic Oligonucleotide
gatagtaacttactcgtaaccatca

SEQ ID NO: 5657 - DNA, 25 bp, Artificial Sequence
  Synthetic Oligonucleotide
ataagacgtaatccccgtacatcgc

SEQ ID NO: 5658 - DNA, 25 bp, Artificial Sequence
  Synthetic Oligonucleotide
cgtaaaagtgtaactggggacatca

SEQ ID NO: 5659 - DNA, 25 bp, Artificial Sequence
  Synthetic Oligonucleotide
aataacagtgatcgagggacttaat

SEQ ID NO: 5660 - DNA, 25 bp, Artificial Sequence
  Synthetic Oligonucleotide
aatcagagtcgaatgagtgaaccaa

SEQ ID NO: 5661 - DNA, 25 bp, Artificial Sequence
  Synthetic Oligonucleotide
gtttctacaatagtggtgctaccaa

SEQ ID NO: 5662 - DNA, 25 bp, Artificial Sequence
  Synthetic Oligonucleotide
atctcaagaagacgttcgtacctca

SEQ ID NO: 5663 - DNA, 25 bp, Artificial Sequence
  Synthetic Oligonucleotide
cgtgtaggtagacgcacgtaccgca

SEQ ID NO: 5664 - DNA, 25 bp, Artificial Sequence
  Synthetic Oligonucleotide
ggtacacgagcggcgactcgtcgaa

SEQ ID NO: 5665 - DNA, 25 bp, Artificial Sequence
  Synthetic Oligonucleotide
cggggtctacactccactcgtgtca

SEQ ID NO: 5666 - DNA, 25 bp, Artificial Sequence
  Synthetic Oligonucleotide
ggcggcgtagcgctcagccgtagca

SEQ ID NO: 5667 - DNA, 25 bp, Artificial Sequence
  Synthetic Oligonucleotide
ggtgggctagggttcagccgtatca

SEQ ID NO: 5668 - DNA, 25 bp, Artificial Sequence
  Synthetic Oligonucleotide
gtggggactcggtctcatggtccac

SEQ ID NO: 5669 - DNA, 25 bp, Artificial Sequence
  Synthetic Oligonucleotide
atttccggatggaccgatggcagct

SEQ ID NO: 5670 - DNA, 25 bp, Artificial Sequence
  Synthetic Oligonucleotide
atctctctttggacgcatttaacct

SEQ ID NO: 5671 - DNA, 25 bp, Artificial Sequence
  Synthetic Oligonucleotide
agtcttgtattgaccactttgtgct

SEQ ID NO: 5672 - DNA, 25 bp, Artificial Sequence
  Synthetic Oligonucleotide
tgtgtagtagtcttcccattttgat

SEQ ID NO: 5673 - DNA, 25 bp, Artificial Sequence
  Synthetic Oligonucleotide
tagttagtacgctaacccacttgca

SEQ ID NO: 5674 - DNA, 25 bp, Artificial Sequence
  Synthetic Oligonucleotide
gtgactcgatagaatccactccgca

SEQ ID NO: 5675 - DNA, 25 bp, Artificial Sequence
  Synthetic Oligonucleotide
catgtgcaatatatgtaacacagcc

SEQ ID NO: 5676 - DNA, 25 bp, Artificial Sequence
  Synthetic Oligonucleotide
gtcgagtaacatgtttcacaccacg

SEQ ID NO: 5677 - DNA, 25 bp, Artificial Sequence
  Synthetic Oligonucleotide
gcgacctcgagtgtgtctcgggcac

SEQ ID NO: 5678 - DNA, 25 bp, Artificial Sequence
  Synthetic Oligonucleotide
gcgactacaccccctcgtggaacac

SEQ ID NO: 5679 - DNA, 25 bp, Artificial Sequence
  Synthetic Oligonucleotide
tactgcgcaacgtccccggattaca

SEQ ID NO: 5680 - DNA, 25 bp, Artificial Sequence
  Synthetic Oligonucleotide
ctgtgccgctctctcgccgattcac

SEQ ID NO: 5681 - DNA, 25 bp, Artificial Sequence
  Synthetic Oligonucleotide
cagcagttctacgatggcaagtcct

SEQ ID NO: 5682 - DNA, 25 bp, Artificial Sequence
  Synthetic Oligonucleotide
aggacttgccatcgtagaactgctg

SEQ ID NO: 5683 - DNA, 25 bp, Artificial Sequence
  Synthetic Oligonucleotide
atgaccttgtacatctggtacatca

SEQ ID NO: 5684 - DNA, 25 bp, Artificial Sequence
  Synthetic Oligonucleotide
cctatggttgaatgtttatactcag

SEQ ID NO: 5685 - DNA, 25 bp, Artificial Sequence
  Synthetic Oligonucleotide
ccgagttatggtaggaatttttcac

SEQ ID NO: 5686 - DNA, 25 bp, Artificial Sequence
  Synthetic Oligonucleotide
actttagtggttcagaacttttttc

SEQ ID NO: 5687 - DNA, 25 bp, Artificial Sequence
  Synthetic Oligonucleotide
gtaggtctgggtaccccttttatgg

SEQ ID NO: 5688 - DNA, 25 bp, Artificial Sequence
  Synthetic Oligonucleotide
gaagcagtgtgtaccgcagcccaaa

SEQ ID NO: 5689 - DNA, 25 bp, Artificial Sequence
  Synthetic Oligonucleotide
tcggtggtacaccaacgaccctaaa

SEQ ID NO: 5690 - DNA, 25 bp, Artificial Sequence
  Synthetic Oligonucleotide
tacggggtaacgtggcgcgatcaac

SEQ ID NO: 5691 - DNA, 25 bp, Artificial Sequence
  Synthetic Oligonucleotide
gtcgaggcgacgcggctagatcaac

SEQ ID NO: 5692 - DNA, 25 bp, Artificial Sequence
  Synthetic Oligonucleotide
tcgtggtcgtagtggggtaaactac

SEQ ID NO: 5693 - DNA, 25 bp, Artificial Sequence
  Synthetic Oligonucleotide
agtcggttcgtgtatgtggtttaca

SEQ ID NO: 5694 - DNA, 25 bp, Artificial Sequence
  Synthetic Oligonucleotide
agtccgtttctgaatcggtgtgaca

SEQ ID NO: 5695 - DNA, 25 bp, Artificial Sequence
  Synthetic Oligonucleotide
gaggggactcggactcgtgttccac

SEQ ID NO: 5696 - DNA, 25 bp, Artificial Sequence
  Synthetic Oligonucleotide
gaggggactcggactcgtgttccac

SEQ ID NO: 5697 - DNA, 25 bp, Artificial Sequence
  Synthetic Oligonucleotide
ggtatggctggtactgaggaactac

SEQ ID NO: 5698 - DNA, 25 bp, Artificial Sequence
  Synthetic Oligonucleotide
aaggctagagctgtagtagtgacac

SEQ ID NO: 5699 - DNA, 25 bp, Artificial Sequence
  Synthetic Oligonucleotide
tgtgtaagttacaggccgcagggaa

SEQ ID NO: 5700 - DNA, 25 bp, Artificial Sequence
  Synthetic Oligonucleotide
gtttaattcggcgtccgaggtgagg

SEQ ID NO: 5701 - DNA, 25 bp, Artificial Sequence
  Synthetic Oligonucleotide
aattttttggtctcacgggtagaca

SEQ ID NO: 5702 - DNA, 25 bp, Artificial Sequence
  Synthetic Oligonucleotide
cacttgttgttagacgacgggagaa

SEQ ID NO: 5703 - DNA, 25 bp, Artificial Sequence
  Synthetic Oligonucleotide
acgtcgttattaggccgcgctagaa

SEQ ID NO: 5704 - DNA, 25 bp, Artificial Sequence
  Synthetic Oligonucleotide
actcgatagtatccactccgcagaa

SEQ ID NO: 5705 - DNA, 25 bp, Artificial Sequence
  Synthetic Oligonucleotide
actacagtagtatgaaccgtccaaa

SEQ ID NO: 5706 - DNA, 25 bp, Artificial Sequence
  Synthetic Oligonucleotide
ctagacgaagaatcgaatccggaaa

SEQ ID NO: 5707 - DNA, 25 bp, Artificial Sequence
  Synthetic Oligonucleotide
taggaataacacagacctggaccac

SEQ ID NO: 5708 - DNA, 25 bp, Artificial Sequence
  Synthetic Oligonucleotide
gtgtaaagaccttccgtctgaccac

SEQ ID NO: 5709 - DNA, 25 bp, Artificial Sequence
  Synthetic Oligonucleotide
tgtcggaaccgtcgtggtcacctac

SEQ ID NO: 5710 - DNA, 25 bp, Artificial Sequence
  Synthetic Oligonucleotide
gtcgagtcacgtggtacttcaactc

SEQ ID NO: 5711 - DNA, 25 bp, Artificial Sequence
  Synthetic Oligonucleotide
tccattagtcattctagtgcaggtc

SEQ ID NO: 5712 - DNA, 25 bp, Artificial Sequence
  Synthetic Oligonucleotide
tgttccatgttcatgaagtccaccc

SEQ ID NO: 5713 - DNA, 25 bp, Artificial Sequence
  Synthetic Oligonucleotide
tttccaacttgagcaagccacgcac

SEQ ID NO: 5714 - DNA, 25 bp, Artificial Sequence
  Synthetic Oligonucleotide
taataggacttctaatgcgaacgaa

SEQ ID NO: 5715 - DNA, 25 bp, Artificial Sequence
  Synthetic Oligonucleotide
tcgttggaggactaatctaagacaa

SEQ ID NO: 5716 - DNA, 25 bp, Artificial Sequence
  Synthetic Oligonucleotide
tcagtgaagacatattacagcgcaa

SEQ ID NO: 5717 - DNA, 25 bp, Artificial Sequence
  Synthetic Oligonucleotide
cagaagacccggatgaggtcgcgaa

SEQ ID NO: 5718 - DNA, 25 bp, Artificial Sequence
  Synthetic Oligonucleotide
ctaggactccggagtgattcggtaa

SEQ ID NO: 5719 - DNA, 25 bp, Artificial Sequence
  Synthetic Oligonucleotide
attaccttgcgaagtgtatccctaa

SEQ ID NO: 5720 - DNA, 25 bp, Artificial Sequence
  Synthetic Oligonucleotide
acatctctggtgtagtaggtgccaa

SEQ ID NO: 5721 - DNA, 25 bp, Artificial Sequence
  Synthetic Oligonucleotide
ccagtttggcctcaggagcacctac

SEQ ID NO: 5722 - DNA, 25 bp, Artificial Sequence
  Synthetic Oligonucleotide
gcagtgggcaccagtggtaccatcc

SEQ ID NO: 5723 - DNA, 25 bp, Artificial Sequence
  Synthetic Oligonucleotide
gtcgctgaacctaaagacctacaac

SEQ ID NO: 5724 - DNA, 25 bp, Artificial Sequence
  Synthetic Oligonucleotide
ggttcccatcgtaaagactctacaa

SEQ ID NO: 5725 - DNA, 25 bp, Artificial Sequence
  Synthetic Oligonucleotide
ttggtccgaccgtgttaacccaaag

SEQ ID NO: 5726 - DNA, 25 bp, Artificial Sequence
  Synthetic Oligonucleotide
ataggtccgccgagcccggacgaaa

SEQ ID NO: 5727 - DNA, 25 bp, Artificial Sequence
  Synthetic Oligonucleotide
gcgcccgacggttgtcccggcgaaa

SEQ ID NO: 5728 - DNA, 25 bp, Artificial Sequence
  Synthetic Oligonucleotide
cccagtcgcgggcagccgtacataa

SEQ ID NO: 5729 - DNA, 25 bp, Artificial Sequence
  Synthetic Oligonucleotide
tcccacctgaggaagacctacaaca

SEQ ID NO: 5730 - DNA, 25 bp, Artificial Sequence
  Synthetic Oligonucleotide
cccagaatgaggaacctccggtaca

SEQ ID NO: 5731 - DNA, 25 bp, Artificial Sequence
  Synthetic Oligonucleotide
tatagattagggaccacagagtaac

SEQ ID NO: 5732 - DNA, 25 bp, Artificial Sequence
  Synthetic Oligonucleotide
taagagtgggagatactgcaggaca

SEQ ID NO: 5733 - DNA, 25 bp, Artificial Sequence
  Synthetic Oligonucleotide
gtcgcggacaagttctgcaacgaca

SEQ ID NO: 5734 - DNA, 25 bp, Artificial Sequence
  Synthetic Oligonucleotide
tcgactagctaaaatcgcaacgacc

SEQ ID NO: 5735 - DNA, 25 bp, Artificial Sequence
  Synthetic Oligonucleotide
cgaactatagtagttcggataccac

SEQ ID NO: 5736 - DNA, 25 bp, Artificial Sequence
  Synthetic Oligonucleotide
aaatagtatgtaggtctgggtaccc

SEQ ID NO: 5737 - DNA, 25 bp, Artificial Sequence
  Synthetic Oligonucleotide
tgcttagttcgtctccgcggtaccc

SEQ ID NO: 5738 - DNA, 25 bp, Artificial Sequence
  Synthetic Oligonucleotide
ctccagttacttccccagtaactac

SEQ ID NO: 5739 - DNA, 25 bp, Artificial Sequence
  Synthetic Oligonucleotide
ccgccgctgcttatcctagaagtac

SEQ ID NO: 5740 - DNA, 25 bp, Artificial Sequence
  Synthetic Oligonucleotide
aagccgactactaatgctagtacaa

SEQ ID NO: 5741 - DNA, 25 bp, Artificial Sequence
  Synthetic Oligonucleotide
attacgtgcggcaagtcgctgacaa

SEQ ID NO: 5742 - DNA, 25 bp, Artificial Sequence
  Synthetic Oligonucleotide
cacttgcgttacgcaaggctgcaag

SEQ ID NO: 5743 - DNA, 25 bp, Artificial Sequence
  Synthetic Oligonucleotide
acaatgtcatctacgaagtttttgg

SEQ ID NO: 5744 - DNA, 25 bp, Artificial Sequence
  Synthetic Oligonucleotide
tacaaaacatcacaaccttgttatg

SEQ ID NO: 5745 - DNA, 25 bp, Artificial Sequence
  Synthetic Oligonucleotide
tataaatcgaaatctaccttaaatg

SEQ ID NO: 5746 - DNA, 25 bp, Artificial Sequence
  Synthetic Oligonucleotide
tttaaatgataagactaccgcattg

SEQ ID NO: 5747 - DNA, 25 bp, Artificial Sequence
  Synthetic Oligonucleotide
ttaagaccgagtatcctcctctttc

SEQ ID NO: 5748 - DNA, 25 bp, Artificial Sequence
  Synthetic Oligonucleotide
acccgcgttcggactacgtcggtac

SEQ ID NO: 5749 - DNA, 25 bp, Artificial Sequence
  Synthetic Oligonucleotide
acgacctcgttggacggtcgtctca

SEQ ID NO: 5750 - DNA, 25 bp, Artificial Sequence
  Synthetic Oligonucleotide
acgtacgcgtgtcgagcagcctgac

SEQ ID NO: 5751 - DNA, 25 bp, Artificial Sequence
  Synthetic Oligonucleotide
gccgcgtgtcgtcacggtcaaccaa

SEQ ID NO: 5752 - DNA, 25 bp, Artificial Sequence
  Synthetic Oligonucleotide
ctcgagtgtcgtacacgtaaaaaca

SEQ ID NO: 5753 - DNA, 25 bp, Artificial Sequence
  Synthetic Oligonucleotide
cttaccggtggttctcgaaaagaac

SEQ ID NO: 5754 - DNA, 25 bp, Artificial Sequence
  Synthetic Oligonucleotide
gtttccttggtattgactaaattac

SEQ ID NO: 5755 - DNA, 25 bp, Artificial Sequence
  Synthetic Oligonucleotide
tgtgatgacttggtctttcaaattc

SEQ ID NO: 5756 - DNA, 25 bp, Artificial Sequence
  Synthetic Oligonucleotide
ttagacttgttctgttcagatattc

SEQ ID NO: 5757 - DNA, 25 bp, Artificial Sequence
  Synthetic Oligonucleotide
ctcgatgacgtttgtttagacttaa

SEQ ID NO: 5758 - DNA, 25 bp, Artificial Sequence
  Synthetic Oligonucleotide
cacgtaaggcgttcggttaattaca

SEQ ID NO: 5759 - DNA, 25 bp, Artificial Sequence
  Synthetic Oligonucleotide
tacgtagtgggtgtaggtcatgaca

SEQ ID NO: 5760 - DNA, 25 bp, Artificial Sequence
  Synthetic Oligonucleotide
tcgttgcgattttagctagtcgaca

SEQ ID NO: 5761 - DNA, 25 bp, Artificial Sequence
  Synthetic Oligonucleotide
cttaggggttcttccgtcgtacaca

SEQ ID NO: 5762 - DNA, 25 bp, Artificial Sequence
  Synthetic Oligonucleotide
cgtaaaacgagtttctttgtcgaca

SEQ ID NO: 5763 - DNA, 25 bp, Artificial Sequence
  Synthetic Oligonucleotide
cggtaaaaatagttggttaacgcac

SEQ ID NO: 5764 - DNA, 25 bp, Artificial Sequence
  Synthetic Oligonucleotide
gtgacataaaagagagaccgccacg

SEQ ID NO: 5765 - DNA, 25 bp, Artificial Sequence
  Synthetic Oligonucleotide
gttgtagcacaagagcaggaaccaa

SEQ ID NO: 5766 - DNA, 25 bp, Artificial Sequence
  Synthetic Oligonucleotide
ggaggaacaggacctagaaccggaa

SEQ ID NO: 5767 - DNA, 25 bp, Artificial Sequence
  Synthetic Oligonucleotide
aaaggagcagagctccaaggaatcg

SEQ ID NO: 5768 - DNA, 25 bp, Artificial Sequence
  Synthetic Oligonucleotide
cacgggagcaaagctctaagaaatc

SEQ ID NO: 5769 - DNA, 25 bp, Artificial Sequence
  Synthetic Oligonucleotide
agtgtcaacggtgttacaaaacatc

SEQ ID NO: 5770 - DNA, 25 bp, Artificial Sequence
  Synthetic Oligonucleotide
gtgtcaacggtgttacaaaacatca

SEQ ID NO: 5771 - DNA, 25 bp, Artificial Sequence
  Synthetic Oligonucleotide
tgtcaacggtgttacaaaacatcac

SEQ ID NO: 5772 - DNA, 25 bp, Artificial Sequence
  Synthetic Oligonucleotide
agacaagacgttccaaaacgtaaac

SEQ ID NO: 5773 - DNA, 25 bp, Artificial Sequence
  Synthetic Oligonucleotide
acggaaacttgtgacttgatgacac

SEQ ID NO: 5774 - DNA, 25 bp, Artificial Sequence
  Synthetic Oligonucleotide
cgaacgaacgttccttagctgacac

SEQ ID NO: 5775 - DNA, 25 bp, Artificial Sequence
  Synthetic Oligonucleotide
tggaaaacttgccgtagacgatgac

SEQ ID NO: 5776 - DNA, 25 bp, Artificial Sequence
  Synthetic Oligonucleotide
cggcttactactttgctaacatgtc

SEQ ID NO: 5777 - DNA, 25 bp, Artificial Sequence
  Synthetic Oligonucleotide
agaagcctaacatttcgtgaaattc

SEQ ID NO: 5778 - DNA, 25 bp, Artificial Sequence
  Synthetic Oligonucleotide
gacctaggaagtggttacaatgtac

SEQ ID NO: 5779 - DNA, 25 bp, Artificial Sequence
  Synthetic Oligonucleotide
tcatcctggatgtggacagttgtat

SEQ ID NO: 5780 - DNA, 25 bp, Artificial Sequence
  Synthetic Oligonucleotide
tgctcctcgcagcagtggccgtttt

SEQ ID NO: 5781 - DNA, 25 bp, Artificial Sequence
  Synthetic Oligonucleotide
ctacggcgcgtacggttgccgcatt

SEQ ID NO: 5782 - DNA, 25 bp, Artificial Sequence
  Synthetic Oligonucleotide
tcttggtggttaggtctgcctcatg

SEQ ID NO: 5783 - DNA, 25 bp, Artificial Sequence
  Synthetic Oligonucleotide
ttagtcgcggtagttagcctccgtc

SEQ ID NO: 5784 - DNA, 25 bp, Artificial Sequence
  Synthetic Oligonucleotide
taaacaaggtgatttagcacgtttc

SEQ ID NO: 5785 - DNA, 25 bp, Artificial Sequence
  Synthetic Oligonucleotide
acgaaaaggacgtctaagtccatgc

SEQ ID NO: 5786 - DNA, 25 bp, Artificial Sequence
  Synthetic Oligonucleotide
caaaagtcgtagaacaagttcataa

SEQ ID NO: 5787 - DNA, 25 bp, Artificial Sequence
  Synthetic Oligonucleotide
tttcttgtgtagaacgattctcaaa

SEQ ID NO: 5788 - DNA, 25 bp, Artificial Sequence
  Synthetic Oligonucleotide
ttttcttgtgtagaacgattctcaa

SEQ ID NO: 5789 - DNA, 25 bp, Artificial Sequence
  Synthetic Oligonucleotide
ttctatggagagaacctaactcgaa

SEQ ID NO: 5790 - DNA, 25 bp, Artificial Sequence
  Synthetic Oligonucleotide
ttatatgcgataacctcgaccttaa

SEQ ID NO: 5791 - DNA, 25 bp, Artificial Sequence
  Synthetic Oligonucleotide
gtcgttttgcgaaccccaatataag

SEQ ID NO: 5792 - DNA, 25 bp, Artificial Sequence
  Synthetic Oligonucleotide
agtttttaggaaaccacacaaaagt

SEQ ID NO: 5793 - DNA, 25 bp, Artificial Sequence
  Synthetic Oligonucleotide
agattttccgagattctaaaaacag

SEQ ID NO: 5794 - DNA, 25 bp, Artificial Sequence
  Synthetic Oligonucleotide
ctgaggcacgagattacgttaaaaa

SEQ ID NO: 5795 - DNA, 25 bp, Artificial Sequence
  Synthetic Oligonucleotide
tgaggtctggtcccgtagtctaaaa

SEQ ID NO: 5796 - DNA, 25 bp, Artificial Sequence
  Synthetic Oligonucleotide
aatcgtcttagtaccaggtatacaa

SEQ ID NO: 5797 - DNA, 25 bp, Artificial Sequence
  Synthetic Oligonucleotide
tactcctcaagacacagattacttg

SEQ ID NO: 5798 - DNA, 25 bp, Artificial Sequence
  Synthetic Oligonucleotide
tcgtttgagatacctcaagttgaag

SEQ ID NO: 5799 - DNA, 25 bp, Artificial Sequence
  Synthetic Oligonucleotide
gttctagaagtagttcatcagtcag

SEQ ID NO: 5800 - DNA, 25 bp, Artificial Sequence
  Synthetic Oligonucleotide
gtccggttagaatgctatcagtcac

SEQ ID NO: 5801 - DNA, 25 bp, Artificial Sequence
  Synthetic Oligonucleotide
agtccataagcaaccactacggcac

SEQ ID NO: 5802 - DNA, 25 bp, Artificial Sequence
  Synthetic Oligonucleotide
gcagggtcaaccactgctacggcac

SEQ ID NO: 5803 - DNA, 25 bp, Artificial Sequence
  Synthetic Oligonucleotide
tcgggaccactggtccgcgggctac

SEQ ID NO: 5804 - DNA, 25 bp, Artificial Sequence
  Synthetic Oligonucleotide
tcgggagtatctacccgtgcaacac

SEQ ID NO: 5805 - DNA, 25 bp, Artificial Sequence
  Synthetic Oligonucleotide
ccaaggccgattagccgttaaccac

SEQ ID NO: 5806 - DNA, 25 bp, Artificial Sequence
  Synthetic Oligonucleotide
gtgccatccgtccgcgtcaatctac

SEQ ID NO: 5807 - DNA, 25 bp, Artificial Sequence
  Synthetic Oligonucleotide
aggacttgccatcgtagaactgctg

SEQ ID NO: 5808 - DNA, 25 bp, Artificial Sequence
  Synthetic Oligonucleotide
cagcagttctacgatggcaagtcct

SEQ ID NO: 5809 - DNA, 25 bp, Artificial Sequence
  Synthetic Oligonucleotide
atgaccttgtacttctggtacatca

SEQ ID NO: 5810 - DNA, 25 bp, Artificial Sequence
  Synthetic Oligonucleotide
cctatggttgaaagtttatactcag

SEQ ID NO: 5811 - DNA, 25 bp, Artificial Sequence
  Synthetic Oligonucleotide
ccgagttatggttggaatttttcac

SEQ ID NO: 5812 - DNA, 25 bp, Artificial Sequence
  Synthetic Oligonucleotide
actttagtggttgagaacttttttc

SEQ ID NO: 5813 - DNA, 25 bp, Artificial Sequence
  Synthetic Oligonucleotide
gtaggtctgggttccccttttatgg

SEQ ID NO: 5814 - DNA, 25 bp, Artificial Sequence
  Synthetic Oligonucleotide
gaagcagtgtgttccgcagcccaaa

SEQ ID NO: 5815 - DNA, 25 bp, Artificial Sequence
  Synthetic Oligonucleotide
tcggtggtacacgaacgaccctaaa

SEQ ID NO: 5816 - DNA, 25 bp, Artificial Sequence
  Synthetic Oligonucleotide
tacggggtaacgaggcgcgatcaac

SEQ ID NO: 5817 - DNA, 25 bp, Artificial Sequence
  Synthetic Oligonucleotide
gtcgaggcgacggggctagatcaac

SEQ ID NO: 5818 - DNA, 25 bp, Artificial Sequence
  Synthetic Oligonucleotide
tcgtggtcgtagaggggtaaactac

SEQ ID NO: 5819 - DNA, 25 bp, Artificial Sequence
  Synthetic Oligonucleotide
agtcggttcgtgaatgtggtttaca

SEQ ID NO: 5820 - DNA, 25 bp, Artificial Sequence
  Synthetic Oligonucleotide
agtccgtttctgtatcggtgtgaca

SEQ ID NO: 5821 - DNA, 25 bp, Artificial Sequence
  Synthetic Oligonucleotide
gaggggactcggtctcgtgttccac

SEQ ID NO: 5822 - DNA, 25 bp, Artificial Sequence
  Synthetic Oligonucleotide
gaggggactcggtctcgtgttccac

SEQ ID NO: 5823 - DNA, 25 bp, Artificial Sequence
  Synthetic Oligonucleotide
ggtatggctggttctgaggaactac

SEQ ID NO: 5824 - DNA, 25 bp, Artificial Sequence
  Synthetic Oligonucleotide
aaggctagagctctagtagtgacac

SEQ ID NO: 5825 - DNA, 25 bp, Artificial Sequence
  Synthetic Oligonucleotide
tgtgtaagttactggccgcagggaa

SEQ ID NO: 5826 - DNA, 25 bp, Artificial Sequence
  Synthetic Oligonucleotide
gtttaattcggcctccgaggtgagg

SEQ ID NO: 5827 - DNA, 25 bp, Artificial Sequence
  Synthetic Oligonucleotide
aattttttggtcacacgggtagaca

SEQ ID NO: 5828 - DNA, 25 bp, Artificial Sequence
  Synthetic Oligonucleotide
cacttgttgttacacgacgggagaa

SEQ ID NO: 5829 - DNA, 25 bp, Artificial Sequence
  Synthetic Oligonucleotide
acgtcgttattacgccgcgctagaa

SEQ ID NO: 5830 - DNA, 25 bp, Artificial Sequence
  Synthetic Oligonucleotide
actcgatagtatgcactccgcagaa

SEQ ID NO: 5831 - DNA, 25 bp, Artificial Sequence
  Synthetic Oligonucleotide
actacagtagtaagaaccgtccaaa

SEQ ID NO: 5832 - DNA, 25 bp, Artificial Sequence
  Synthetic Oligonucleotide
ctagacgaagaaacgaatccggaaa

SEQ ID NO: 5833 - DNA, 25 bp, Artificial Sequence
  Synthetic Oligonucleotide
taggaataacactgacctggaccac

SEQ ID NO: 5834 - DNA, 25 bp, Artificial Sequence
  Synthetic Oligonucleotide
gtgtaaagacctaccgtctgaccac

SEQ ID NO: 5835 - DNA, 25 bp, Artificial Sequence
  Synthetic Oligonucleotide
tgtcggaaccgtggtggtcacctac

SEQ ID NO: 5836 - DNA, 25 bp, Artificial Sequence
  Synthetic Oligonucleotide
gtcgagtcacgtcgtacttcaactc

SEQ ID NO: 5837 - DNA, 25 bp, Artificial Sequence
  Synthetic Oligonucleotide
tccattagtcatactagtgcaggtc

SEQ ID NO: 5838 - DNA, 25 bp, Artificial Sequence
  Synthetic Oligonucleotide
tgttccatgttcttgaagtccaccc

SEQ ID NO: 5839 - DNA, 25 bp, Artificial Sequence
  Synthetic Oligonucleotide
tttccaacttgaccaagccacgcac

SEQ ID NO: 5840 - DNA, 25 bp, Artificial Sequence
  Synthetic Oligonucleotide
taataggacttcaaatgcgaacgaa

SEQ ID NO: 5841 - DNA, 25 bp, Artificial Sequence
  Synthetic Oligonucleotide
tcgttggaggacaaatctaagacaa

SEQ ID NO: 5842 - DNA, 25 bp, Artificial Sequence
  Synthetic Oligonucleotide
tcagtgaagacaaattacagcgcaa

SEQ ID NO: 5843 - DNA, 25 bp, Artificial Sequence
  Synthetic Oligonucleotide
cagaagacccggttgaggtcgcgaa

SEQ ID NO: 5844 - DNA, 25 bp, Artificial Sequence
  Synthetic Oligonucleotide
ctaggactccggtgtgattcggtaa

SEQ ID NO: 5845 - DNA, 25 bp, Artificial Sequence
  Synthetic Oligonucleotide
attaccttgcgatgtgtatccctaa

SEQ ID NO: 5846 - DNA, 25 bp, Artificial Sequence
  Synthetic Oligonucleotide
acatctctggtgaagtaggtgccaa

SEQ ID NO: 5847 - DNA, 25 bp, Artificial Sequence
  Synthetic Oligonucleotide
ccagtttggcctgaggagcacctac

SEQ ID NO: 5848 - DNA, 25 bp, Artificial Sequence
  Synthetic Oligonucleotide
gcagtgggcacctgtggtaccatcc

SEQ ID NO: 5849 - DNA, 25 bp, Artificial Sequence
  Synthetic Oligonucleotide
gtcgctgaaccttaagacctacaac

SEQ ID NO: 5850 - DNA, 25 bp, Artificial Sequence
  Synthetic Oligonucleotide
ggttcccatcgttaagactctacaa

SEQ ID NO: 5851 - DNA, 25 bp, Artificial Sequence
  Synthetic Oligonucleotide
ttggtccgaccgagttaacccaaag

SEQ ID NO: 5852 - DNA, 25 bp, Artificial Sequence
  Synthetic Oligonucleotide
ataggtccgccgtgcccggacgaaa

SEQ ID NO: 5853 - DNA, 25 bp, Artificial Sequence
  Synthetic Oligonucleotide
gcgcccgacggtagtcccggcgaaa

SEQ ID NO: 5854 - DNA, 25 bp, Artificial Sequence
  Synthetic Oligonucleotide
cccagtcgcggggagccgtacataa

SEQ ID NO: 5855 - DNA, 25 bp, Artificial Sequence
  Synthetic Oligonucleotide
tcccacctgaggtagacctacaaca

SEQ ID NO: 5856 - DNA, 25 bp, Artificial Sequence
  Synthetic Oligonucleotide
cccagaatgaggtacctccggtaca

SEQ ID NO: 5857 - DNA, 25 bp, Artificial Sequence
  Synthetic Oligonucleotide
tatagattagggtccacagagtaac

SEQ ID NO: 5858 - DNA, 25 bp, Artificial Sequence
  Synthetic Oligonucleotide
taagagtgggagttactgcaggaca

SEQ ID NO: 5859 - DNA, 25 bp, Artificial Sequence
  Synthetic Oligonucleotide
gtcgcggacaagatctgcaacgaca

SEQ ID NO: 5860 - DNA, 25 bp, Artificial Sequence
  Synthetic Oligonucleotide
tcgactagctaatatcgcaacgacc

SEQ ID NO: 5861 - DNA, 25 bp, Artificial Sequence
  Synthetic Oligonucleotide
cgaactatagtacttcggataccac

SEQ ID NO: 5862 - DNA, 25 bp, Artificial Sequence
  Synthetic Oligonucleotide
aaatagtatgtacgtctgggtaccc

SEQ ID NO: 5863 - DNA, 25 bp, Artificial Sequence
  Synthetic Oligonucleotide
tgcttagttcgtgtccgcggtaccc

SEQ ID NO: 5864 - DNA, 25 bp, Artificial Sequence
  Synthetic Oligonucleotide
ctccagttacttgcccagtaactac

SEQ ID NO: 5865 - DNA, 25 bp, Artificial Sequence
  Synthetic Oligonucleotide
ccgccgctgcttttcctagaagtac

SEQ ID NO: 5866 - DNA, 25 bp, Artificial Sequence
  Synthetic Oligonucleotide
aagccgactacttatgctagtacaa

SEQ ID NO: 5867 - DNA, 25 bp, Artificial Sequence
  Synthetic Oligonucleotide
attacgtgcggctagtcgctgacaa

SEQ ID NO: 5868 - DNA, 25 bp, Artificial Sequence
  Synthetic Oligonucleotide
cacttgcgttacccaaggctgcaag

SEQ ID NO: 5869 - DNA, 25 bp, Artificial Sequence
  Synthetic Oligonucleotide
acaatgtcatcttcgaagtttttgg

SEQ ID NO: 5870 - DNA, 25 bp, Artificial Sequence
  Synthetic Oligonucleotide
tacaaaacatcagaaccttgttatg

SEQ ID NO: 5871 - DNA, 25 bp, Artificial Sequence
  Synthetic Oligonucleotide
tataaatcgaaaactaccttaaatg

SEQ ID NO: 5872 - DNA, 25 bp, Artificial Sequence
  Synthetic Oligonucleotide
tttaaatgataacactaccgcattg

SEQ ID NO: 5873 - DNA, 25 bp, Artificial Sequence
  Synthetic Oligonucleotide
ttaagaccgagtttcctcctctttc

SEQ ID NO: 5874 - DNA, 25 bp, Artificial Sequence
  Synthetic Oligonucleotide
acccgcgttcggtctacgtcggtac

SEQ ID NO: 5875 - DNA, 25 bp, Artificial Sequence
  Synthetic Oligonucleotide
acgacctcgttgcacggtcgtctca

SEQ ID NO: 5876 - DNA, 25 bp, Artificial Sequence
  Synthetic Oligonucleotide
acgtacgcgtgtggagcagcctgac

SEQ ID NO: 5877 - DNA, 25 bp, Artificial Sequence
  Synthetic Oligonucleotide
gccgcgtgtcgtgacggtcaaccaa

SEQ ID NO: 5878 - DNA, 25 bp, Artificial Sequence
  Synthetic Oligonucleotide
ctcgagtgtcgttcacgtaaaaaca

SEQ ID NO: 5879 - DNA, 25 bp, Artificial Sequence
  Synthetic Oligonucleotide
cttaccggtggtactcgaaaagaac

SEQ ID NO: 5880 - DNA, 25 bp, Artificial Sequence
  Synthetic Oligonucleotide
gtttccttggtaatgactaaattac

SEQ ID NO: 5881 - DNA, 25 bp, Artificial Sequence
  Synthetic Oligonucleotide
tgtgatgacttgctctttcaaattc

SEQ ID NO: 5882 - DNA, 25 bp, Artificial Sequence
  Synthetic Oligonucleotide
ttagacttgttcagttcagatattc

SEQ ID NO: 5883 - DNA, 25 bp, Artificial Sequence
  Synthetic Oligonucleotide
ctcgatgacgttagtttagacttaa

SEQ ID NO: 5884 - DNA, 25 bp, Artificial Sequence
  Synthetic Oligonucleotide
cacgtaaggcgtacggttaattaca

SEQ ID NO: 5885 - DNA, 25 bp, Artificial Sequence
  Synthetic Oligonucleotide
tacgtagtgggtctaggtcatgaca

SEQ ID NO: 5886 - DNA, 25 bp, Artificial Sequence
  Synthetic Oligonucleotide
tcgttgcgatttaagctagtcgaca

SEQ ID NO: 5887 - DNA, 25 bp, Artificial Sequence
  Synthetic Oligonucleotide
cttaggggttctaccgtcgtacaca

SEQ ID NO: 5888 - DNA, 25 bp, Artificial Sequence
  Synthetic Oligonucleotide
cgtaaaacgagtatctttgtcgaca

SEQ ID NO: 5889 - DNA, 25 bp, Artificial Sequence
  Synthetic Oligonucleotide
cggtaaaaatagatggttaacgcac

SEQ ID NO: 5890 - DNA, 25 bp, Artificial Sequence
  Synthetic Oligonucleotide
gtgacataaaagtgagaccgccacg

SEQ ID NO: 5891 - DNA, 25 bp, Artificial Sequence
  Synthetic Oligonucleotide
gttgtagcacaacagcaggaaccaa

SEQ ID NO: 5892 - DNA, 25 bp, Artificial Sequence
  Synthetic Oligonucleotide
ggaggaacaggagctagaaccggaa

SEQ ID NO: 5893 - DNA, 25 bp, Artificial Sequence
  Synthetic Oligonucleotide
aaaggagcagaggtccaaggaatcg

SEQ ID NO: 5894 - DNA, 25 bp, Artificial Sequence
  Synthetic Oligonucleotide
cacgggagcaaacctctaagaaatc

SEQ ID NO: 5895 - DNA, 25 bp, Artificial Sequence
  Synthetic Oligonucleotide
agtgtcaacggtcttacaaaacatc

SEQ ID NO: 5896 - DNA, 25 bp, Artificial Sequence
  Synthetic Oligonucleotide
gtgtcaacggtgatacaaaacatca

SEQ ID NO: 5897 - DNA, 25 bp, Artificial Sequence
  Synthetic Oligonucleotide
tgtcaacggtgtaacaaaacatcac

SEQ ID NO: 5898 - DNA, 25 bp, Artificial Sequence
  Synthetic Oligonucleotide
agacaagacgttgcaaaacgtaaac

SEQ ID NO: 5899 - DNA, 25 bp, Artificial Sequence
  Synthetic Oligonucleotide
acggaaacttgtcacttgatgacac

SEQ ID NO: 5900 - DNA, 25 bp, Artificial Sequence
  Synthetic Oligonucleotide
cgaacgaacgttgcttagctgacac

SEQ ID NO: 5901 - DNA, 25 bp, Artificial Sequence
  Synthetic Oligonucleotide
tggaaaacttgcggtagacgatgac

SEQ ID NO: 5902 - DNA, 25 bp, Artificial Sequence
  Synthetic Oligonucleotide
cggcttactactatgctaacatgtc

SEQ ID NO: 5903 - DNA, 25 bp, Artificial Sequence
  Synthetic Oligonucleotide
agaagcctaacaattcgtgaaattc

SEQ ID NO: 5904 - DNA, 25 bp, Artificial Sequence
  Synthetic Oligonucleotide
gacctaggaagtcgttacaatgtac

SEQ ID NO: 5905 - DNA, 25 bp, Artificial Sequence
  Synthetic Oligonucleotide
tcatcctggatgaggacagttgtat

SEQ ID NO: 5906 - DNA, 25 bp, Artificial Sequence
  Synthetic Oligonucleotide
tgctcctcgcaggagtggccgtttt

SEQ ID NO: 5907 - DNA, 25 bp, Artificial Sequence
  Synthetic Oligonucleotide
ctacggcgcgtagggttgccgcatt

SEQ ID NO: 5908 - DNA, 25 bp, Artificial Sequence
  Synthetic Oligonucleotide
tcttggtggttacgtctgcctcatg

SEQ ID NO: 5909 - DNA, 25 bp, Artificial Sequence
  Synthetic Oligonucleotide
ttagtcgcggtacttagcctccgtc

SEQ ID NO: 5910 - DNA, 25 bp, Artificial Sequence
  Synthetic Oligonucleotide
taaacaaggtgaattagcacgtttc

SEQ ID NO: 5911 - DNA, 25 bp, Artificial Sequence
  Synthetic Oligonucleotide
acgaaaaggacgactaagtccatgc

SEQ ID NO: 5912 - DNA, 25 bp, Artificial Sequence
  Synthetic Oligonucleotide
caaaagtcgtagtacaagttcataa

SEQ ID NO: 5913 - DNA, 25 bp, Artificial Sequence
  Synthetic Oligonucleotide
tttcttgtgtagtacgattctcaaa

SEQ ID NO: 5914 - DNA, 25 bp, Artificial Sequence
  Synthetic Oligonucleotide
ttttcttgtgtacaacgattctcaa

SEQ ID NO: 5915 - DNA, 25 bp, Artificial Sequence
  Synthetic Oligonucleotide
ttctatggagagtacctaactcgaa

SEQ ID NO: 5916 - DNA, 25 bp, Artificial Sequence
  Synthetic Oligonucleotide
ttatatgcgatatcctcgaccttaa

SEQ ID NO: 5917 - DNA, 25 bp, Artificial Sequence
  Synthetic Oligonucleotide
gtcgttttgcgatccccaatataag

SEQ ID NO: 5918 - DNA, 25 bp, Artificial Sequence
  Synthetic Oligonucleotide
agtttttaggaatccacacaaaagt

SEQ ID NO: 5919 - DNA, 25 bp, Artificial Sequence
  Synthetic Oligonucleotide
agattttccgagtttctaaaaacag

SEQ ID NO: 5920 - DNA, 25 bp, Artificial Sequence
  Synthetic Oligonucleotide
ctgaggcacgagtttacgttaaaaa

SEQ ID NO: 5921 - DNA, 25 bp, Artificial Sequence
  Synthetic Oligonucleotide
tgaggtctggtcgcgtagtctaaaa

SEQ ID NO: 5922 - DNA, 25 bp, Artificial Sequence
  Synthetic Oligonucleotide
aatcgtcttagttccaggtatacaa

SEQ ID NO: 5923 - DNA, 25 bp, Artificial Sequence
  Synthetic Oligonucleotide
tactcctcaagagacagattacttg

SEQ ID NO: 5924 - DNA, 25 bp, Artificial Sequence
  Synthetic Oligonucleotide
tcgtttgagatagctcaagttgaag

SEQ ID NO: 5925 - DNA, 25 bp, Artificial Sequence
  Synthetic Oligonucleotide
gttctagaagtacttcatcagtcag

SEQ ID NO: 5926 - DNA, 25 bp, Artificial Sequence
  Synthetic Oligonucleotide
gtccggttagaaagctatcagtcac

SEQ ID NO: 5927 - DNA, 25 bp, Artificial Sequence
  Synthetic Oligonucleotide
agtccataagcatccactacggcac

SEQ ID NO: 5928 - DNA, 25 bp, Artificial Sequence
  Synthetic Oligonucleotide
gcagggtcaacctctgctacggcac

SEQ ID NO: 5929 - DNA, 25 bp, Artificial Sequence
  Synthetic Oligonucleotide
tcgggaccactgctccgcgggctac

SEQ ID NO: 5930 - DNA, 25 bp, Artificial Sequence
  Synthetic Oligonucleotide
tcgggagtatcttcccgtgcaacac

SEQ ID NO: 5931 - DNA, 25 bp, Artificial Sequence
  Synthetic Oligonucleotide
ccaaggccgatttgccgttaaccac

SEQ ID NO: 5932 - DNA, 25 bp, Artificial Sequence
  Synthetic Oligonucleotide
gtgccatccgtcggcgtcaatctac

SEQ ID NO: 5933 - DNA, 25 bp, Artificial Sequence
  Synthetic Oligonucleotide
cagcagttctacgatggcaagtcct

SEQ ID NO: 5934 - DNA, 25 bp, Artificial Sequence
  Synthetic Oligonucleotide
aggacttgccatcgtagaactgctg

SEQ ID NO: 5935 - DNA, 25 bp, Artificial Sequence
  Synthetic Oligonucleotide
tatctgcgcgttcttggaccaagac

SEQ ID NO: 5936 - DNA, 25 bp, Artificial Sequence
  Synthetic Oligonucleotide
ttctcggtgttcctgagttccaatc

SEQ ID NO: 5937 - DNA, 25 bp, Artificial Sequence
  Synthetic Oligonucleotide
tctatgatggtagttttcaactatc

SEQ ID NO: 5938 - DNA, 25 bp, Artificial Sequence
  Synthetic Oligonucleotide
tcttgaatcacggttacattaattc

SEQ ID NO: 5939 - DNA, 25 bp, Artificial Sequence
  Synthetic Oligonucleotide
ggtctgaattcctatgtgtaatgtc

SEQ ID NO: 5940 - DNA, 25 bp, Artificial Sequence
  Synthetic Oligonucleotide
ccctaatttccacacagtaaggtcg

SEQ ID NO: 5941 - DNA, 25 bp, Artificial Sequence
  Synthetic Oligonucleotide
aggacttgccatcgtagaactgctg

SEQ ID NO: 5942 - DNA, 25 bp, Artificial Sequence
  Synthetic Oligonucleotide
cagcagttctacgatggcaagtcct

SEQ ID NO: 5943 - DNA, 25 bp, Artificial Sequence
  Synthetic Oligonucleotide
gtagattgacgcggacggatggcac

SEQ ID NO: 5944 - DNA, 25 bp, Artificial Sequence
  Synthetic Oligonucleotide
ttttgattggacagagtgctgccag

SEQ ID NO: 5945 - DNA, 25 bp, Artificial Sequence
  Synthetic Oligonucleotide
gaacggccttccaggtagctgccag

SEQ ID NO: 5946 - DNA, 25 bp, Artificial Sequence
  Synthetic Oligonucleotide
cgaggagcctttgttgtgcttcaag

SEQ ID NO: 5947 - DNA, 25 bp, Artificial Sequence
  Synthetic Oligonucleotide
acgtaagggtttgttgagctgagaa

SEQ ID NO: 5948 - DNA, 25 bp, Artificial Sequence
  Synthetic Oligonucleotide
taaaagttgtatgttgcgttctaaa

SEQ ID NO: 5949 - DNA, 25 bp, Artificial Sequence
  Synthetic Oligonucleotide
gtaactgtggttgttgtttgtaccc

SEQ ID NO: 5950 - DNA, 25 bp, Artificial Sequence
  Synthetic Oligonucleotide
gtaacagtgtgctttctccatttcc

SEQ ID NO: 5951 - DNA, 25 bp, Artificial Sequence
  Synthetic Oligonucleotide
taacttggctgttaggtcatttatc

SEQ ID NO: 5952 - DNA, 25 bp, Artificial Sequence
  Synthetic Oligonucleotide
tagttggccgtttagcaactgaaac

SEQ ID NO: 5953 - DNA, 25 bp, Artificial Sequence
  Synthetic Oligonucleotide
ttgtgtctgtgtacgtccacggaaa

SEQ ID NO: 5954 - DNA, 25 bp, Artificial Sequence
  Synthetic Oligonucleotide
cttggtcgatgatctaccaagctaa

SEQ ID NO: 5955 - DNA, 25 bp, Artificial Sequence
  Synthetic Oligonucleotide
ccaggtcgctgaggaccacgaggaa

SEQ ID NO: 5956 - DNA, 25 bp, Artificial Sequence
  Synthetic Oligonucleotide
gacctttcatcaacgaccaaaacat

SEQ ID NO: 5957 - DNA, 25 bp, Artificial Sequence
  Synthetic Oligonucleotide
cttacttcttcaaggcgaactgaat

SEQ ID NO: 5958 - DNA, 25 bp, Artificial Sequence
  Synthetic Oligonucleotide
taacttcttctaactcgtcgccaaa

SEQ ID NO: 5959 - DNA, 25 bp, Artificial Sequence
  Synthetic Oligonucleotide
ctatctctttaccacgcctgcgcac

SEQ ID NO: 5960 - DNA, 25 bp, Artificial Sequence
  Synthetic Oligonucleotide
tgactgcgactacacgctttcgcac

SEQ ID NO: 5961 - DNA, 25 bp, Artificial Sequence
  Synthetic Oligonucleotide
tcatgttacacgaaggtgtccctac

SEQ ID NO: 5962 - DNA, 25 bp, Artificial Sequence
  Synthetic Oligonucleotide
tcccttcgaccgaagagttctgctc

SEQ ID NO: 5963 - DNA, 25 bp, Artificial Sequence
  Synthetic Oligonucleotide
aggacttgccatcgtagaactgctg

SEQ ID NO: 5964 - DNA, 25 bp, Artificial Sequence
  Synthetic Oligonucleotide
cagcagttctacgatggcaagtcct

SEQ ID NO: 5965 - DNA, 25 bp, Artificial Sequence
  Synthetic Oligonucleotide
ccgctctgtcgccgattcacagttc

SEQ ID NO: 5966 - DNA, 25 bp, Artificial Sequence
  Synthetic Oligonucleotide
atacgtcgtctgccacaaaccataa

SEQ ID NO: 5967 - DNA, 25 bp, Artificial Sequence
  Synthetic Oligonucleotide
ctcttggagagaaaacgacactaca

SEQ ID NO: 5968 - DNA, 25 bp, Artificial Sequence
  Synthetic Oligonucleotide
taatttcgacatcaaaaaccgagag

SEQ ID NO: 5969 - DNA, 25 bp, Artificial Sequence
  Synthetic Oligonucleotide
tctgtcgactagctaaaatcgcaac

SEQ ID NO: 5970 - DNA, 25 bp, Artificial Sequence
  Synthetic Oligonucleotide
ttgtgtcgatgctggaacgacggaa

SEQ ID NO: 5971 - DNA, 25 bp, Artificial Sequence
  Synthetic Oligonucleotide
tatttcgtgtagcggactcagacaa

SEQ ID NO: 5972 - DNA, 25 bp, Artificial Sequence
  Synthetic Oligonucleotide
tctgctcgagtgagagacaccacaa

SEQ ID NO: 5973 - DNA, 25 bp, Artificial Sequence
  Synthetic Oligonucleotide
cccttccgagatagagatctcaaca

SEQ ID NO: 5974 - DNA, 25 bp, Artificial Sequence
  Synthetic Oligonucleotide
ctcggttggcatatttctcaacacg

SEQ ID NO: 5975 - DNA, 25 bp, Artificial Sequence
  Synthetic Oligonucleotide
ctttccgcgtgcattctccaaccgt

SEQ ID NO: 5976 - DNA, 25 bp, Artificial Sequence
  Synthetic Oligonucleotide
cctttctcctgtatcttccgtaagg

SEQ ID NO: 5977 - DNA, 25 bp, Artificial Sequence
  Synthetic Oligonucleotide
cctatacgccttcgtccttctgagg

SEQ ID NO: 5978 - DNA, 25 bp, Artificial Sequence
  Synthetic Oligonucleotide
aatccttctttacaaccataggagg

SEQ ID NO: 5979 - DNA, 25 bp, Artificial Sequence
  Synthetic Oligonucleotide
gtccgttccttctcgaccgaaaagg

SEQ ID NO: 5980 - DNA, 25 bp, Artificial Sequence
  Synthetic Oligonucleotide
gacctaggcttctccgctcgaaagg

SEQ ID NO: 5981 - DNA, 25 bp, Artificial Sequence
  Synthetic Oligonucleotide
cccgaccttccgtcacgtgaaagag

SEQ ID NO: 5982 - DNA, 25 bp, Artificial Sequence
  Synthetic Oligonucleotide
caccagcaaccgtactagcatgaag

SEQ ID NO: 5983 - DNA, 25 bp, Artificial Sequence
  Synthetic Oligonucleotide
cccatcaacagcttcgcgcggaagt

SEQ ID NO: 5984 - DNA, 25 bp, Artificial Sequence
  Synthetic Oligonucleotide
aaactgagacagtcgtagccagaca

SEQ ID NO: 5985 - DNA, 25 bp, Artificial Sequence
  Synthetic Oligonucleotide
aggacttgccatcgtagaactgctg

SEQ ID NO: 5986 - DNA, 25 bp, Artificial Sequence
  Synthetic Oligonucleotide
cagcagttctacgatggcaagtcct

SEQ ID NO: 5987 - DNA, 25 bp, Artificial Sequence
  Synthetic Oligonucleotide
cacggtggccgcgtacgtccagttc

SEQ ID NO: 5988 - DNA, 25 bp, Artificial Sequence
  Synthetic Oligonucleotide
agcgctgccacgtctacttcttgac

SEQ ID NO: 5989 - DNA, 25 bp, Artificial Sequence
  Synthetic Oligonucleotide
atcctcctctttcatggtactgact

SEQ ID NO: 5990 - DNA, 25 bp, Artificial Sequence
  Synthetic Oligonucleotide
atcacaaccttgttatggactacac

SEQ ID NO: 5991 - DNA, 25 bp, Artificial Sequence
  Synthetic Oligonucleotide
acacacaaacattcacatgatgtac

SEQ ID NO: 5992 - DNA, 25 bp, Artificial Sequence
  Synthetic Oligonucleotide
acaccaacgaccctaaacttgagac

SEQ ID NO: 5993 - DNA, 25 bp, Artificial Sequence
  Synthetic Oligonucleotide
ctaccactaccctaaaggtaactac

SEQ ID NO: 5994 - DNA, 25 bp, Artificial Sequence
  Synthetic Oligonucleotide
tccctcgaaccctaagactgagaca

SEQ ID NO: 5995 - DNA, 25 bp, Artificial Sequence
  Synthetic Oligonucleotide
gacctgaactggtaagtattcgaca

SEQ ID NO: 5996 - DNA, 25 bp, Artificial Sequence
  Synthetic Oligonucleotide
gtcccagcttgaacaagttctacag

SEQ ID NO: 5997 - DNA, 25 bp, Artificial Sequence
  Synthetic Oligonucleotide
gtcgtgctgcctcaaagtgttctaa

SEQ ID NO: 5998 - DNA, 25 bp, Artificial Sequence
  Synthetic Oligonucleotide
gtcttagtgattacaatagttcatc

SEQ ID NO: 5999 - DNA, 25 bp, Artificial Sequence
  Synthetic Oligonucleotide
ttacttccgatctcaaacctaatct

SEQ ID NO: 6000 - DNA, 25 bp, Artificial Sequence
  Synthetic Oligonucleotide
tctaagaccccgtcgagaaaaatac

SEQ ID NO: 6001 - DNA, 25 bp, Artificial Sequence
  Synthetic Oligonucleotide
ccgttgcatccgttcgaagaggaaa

SEQ ID NO: 6002 - DNA, 25 bp, Artificial Sequence
  Synthetic Oligonucleotide
gcagctaggacggcgaaagcgaaac

SEQ ID NO: 6003 - DNA, 25 bp, Artificial Sequence
  Synthetic Oligonucleotide
cggtagcgcgacggacataggcgaa

SEQ ID NO: 6004 - DNA, 25 bp, Artificial Sequence
  Synthetic Oligonucleotide
cgacgacgacgacacgaaggcgaca

SEQ ID NO: 6005 - DNA, 25 bp, Artificial Sequence
  Synthetic Oligonucleotide
gggtcgtcgacttacacaaggctaa

SEQ ID NO: 6006 - DNA, 25 bp, Artificial Sequence
  Synthetic Oligonucleotide
cggcgtaggactcccagaagtcgaa

SEQ ID NO: 6007 - DNA, 25 bp, Artificial Sequence
  Synthetic Oligonucleotide
aggacttgccatcgtagaactgctg

SEQ ID NO: 6008 - DNA, 25 bp, Artificial Sequence
  Synthetic Oligonucleotide
cagcagttctacgatggcaagtcct

SEQ ID NO: 6009 - DNA, 25 bp, Artificial Sequence
  Synthetic Oligonucleotide
cgtaaagtggcgatgtgtaccttaa

SEQ ID NO: 6010 - DNA, 25 bp, Artificial Sequence
  Synthetic Oligonucleotide
cgtaaagtggcgatgtgtaccttaa

SEQ ID NO: 6011 - DNA, 25 bp, Artificial Sequence
  Synthetic Oligonucleotide
actctaggtcggagtgctcctcaca

SEQ ID NO: 6012 - DNA, 25 bp, Artificial Sequence
  Synthetic Oligonucleotide
actctaggtgtaaacaaccttccat

SEQ ID NO: 6013 - DNA, 25 bp, Artificial Sequence
  Synthetic Oligonucleotide
cgtccgggaataaaccgttctctac

SEQ ID NO: 6014 - DNA, 25 bp, Artificial Sequence
  Synthetic Oligonucleotide
ccgttcaaagttatcctctcgacac

SEQ ID NO: 6015 - DNA, 25 bp, Artificial Sequence
  Synthetic Oligonucleotide
ctgccaacaggtgtgtctgagaccg

SEQ ID NO: 6016 - DNA, 25 bp, Artificial Sequence
  Synthetic Oligonucleotide
ctgctgtcccggtgtgtctgtcaac

SEQ ID NO: 6017 - DNA, 25 bp, Artificial Sequence
  Synthetic Oligonucleotide
gtgccttccggtacggtcactcgaa

SEQ ID NO: 6018 - DNA, 25 bp, Artificial Sequence
  Synthetic Oligonucleotide
gggacctctgagacggtcgccagac

SEQ ID NO: 6019 - DNA, 25 bp, Artificial Sequence
  Synthetic Oligonucleotide
agtgagacctttcatcaacgaccaa

SEQ ID NO: 6020 - DNA, 25 bp, Artificial Sequence
  Synthetic Oligonucleotide
cgggaccgtgtacttcaacccatac

SEQ ID NO: 6021 - DNA, 25 bp, Artificial Sequence
  Synthetic Oligonucleotide
gagagtaccgttcttaaactctttc

SEQ ID NO: 6022 - DNA, 25 bp, Artificial Sequence
  Synthetic Oligonucleotide
ttaagcttttgttacgaacttgttc

SEQ ID NO: 6023 - DNA, 25 bp, Artificial Sequence
  Synthetic Oligonucleotide
tttaataggtgacaaaaaccttgtc

SEQ ID NO: 6024 - DNA, 25 bp, Artificial Sequence
  Synthetic Oligonucleotide
ctatgggagaaacagaacctagaac

SEQ ID NO: 6025 - DNA, 25 bp, Artificial Sequence
  Synthetic Oligonucleotide
atggaagaactacagcagtataaac

SEQ ID NO: 6026 - DNA, 25 bp, Artificial Sequence
  Synthetic Oligonucleotide
gttcgactactgaacgcgaatgatc

SEQ ID NO: 6027 - DNA, 25 bp, Artificial Sequence
  Synthetic Oligonucleotide
gtactgatattaacggatacttaac

SEQ ID NO: 6028 - DNA, 25 bp, Artificial Sequence
  Synthetic Oligonucleotide
cagccgtacataatcgagatcttaa

SEQ ID NO: 6029 - DNA, 25 bp, Artificial Sequence
  Synthetic Oligonucleotide
aggacttgccatcgtagaactgctg

SEQ ID NO: 6030 - DNA, 25 bp, Artificial Sequence
  Synthetic Oligonucleotide
cagcagttctacgatggcaagtcct

SEQ ID NO: 6031 - DNA, 25 bp, Artificial Sequence
  Synthetic Oligonucleotide
tacagtctaggtgttgcctatgtaa

SEQ ID NO: 6032 - DNA, 25 bp, Artificial Sequence
  Synthetic Oligonucleotide
cccgtctcctggttgtacccgtaaa

SEQ ID NO: 6033 - DNA, 25 bp, Artificial Sequence
  Synthetic Oligonucleotide
ccttctacctcggtttcgccactaa

SEQ ID NO: 6034 - DNA, 25 bp, Artificial Sequence
  Synthetic Oligonucleotide
atttacggtccgtctacgtacccaa

SEQ ID NO: 6035 - DNA, 25 bp, Artificial Sequence
  Synthetic Oligonucleotide
tatacgacggcgtcgtcgccttcac

SEQ ID NO: 6036 - DNA, 25 bp, Artificial Sequence
  Synthetic Oligonucleotide
cagcggacgtcaggtcgaccgtttc

SEQ ID NO: 6037 - DNA, 25 bp, Artificial Sequence
  Synthetic Oligonucleotide
ccaccagagcagaagcagtgtgtac

SEQ ID NO: 6038 - DNA, 25 bp, Artificial Sequence
  Synthetic Oligonucleotide
ccaccagagcagaagcagtgtgtac

SEQ ID NO: 6039 - DNA, 25 bp, Artificial Sequence
  Synthetic Oligonucleotide
cccgagcgcggctgcagaggtgtaa

SEQ ID NO: 6040 - DNA, 25 bp, Artificial Sequence
  Synthetic Oligonucleotide
caccgtacttcgccaagtagtagaa

SEQ ID NO: 6041 - DNA, 25 bp, Artificial Sequence
  Synthetic Oligonucleotide
cttctaactcgtcgccaaacgtaaa

SEQ ID NO: 6042 - DNA, 25 bp, Artificial Sequence
  Synthetic Oligonucleotide
agtgaatcgtgtcccatatatcgaa

SEQ ID NO: 6043 - DNA, 25 bp, Artificial Sequence
  Synthetic Oligonucleotide
gagtaacgtagcccgttatgtagaa

SEQ ID NO: 6044 - DNA, 25 bp, Artificial Sequence
  Synthetic Oligonucleotide
agtagttcacacgcgtgttcttaaa

SEQ ID NO: 6045 - DNA, 25 bp, Artificial Sequence
  Synthetic Oligonucleotide
ggttgccgtacctcggtatttaaag

SEQ ID NO: 6046 - DNA, 25 bp, Artificial Sequence
  Synthetic Oligonucleotide
tctattccgttgttccgttttaaag

SEQ ID NO: 6047 - DNA, 25 bp, Artificial Sequence
  Synthetic Oligonucleotide
gtcatagcgtggctcgcgttttaaa

SEQ ID NO: 6048 - DNA, 25 bp, Artificial Sequence
  Synthetic Oligonucleotide
gcgtctacgactgttccatcttcaa

SEQ ID NO: 6049 - DNA, 25 bp, Artificial Sequence
  Synthetic Oligonucleotide
agtccggactaggttgacatttttc

SEQ ID NO: 6050 - DNA, 25 bp, Artificial Sequence
  Synthetic Oligonucleotide
ctcggctgtagcttcctagtttttc

SEQ ID NO: 6051 - DNA, 25 bp, Artificial Sequence
  Synthetic Oligonucleotide
aggacttgccatcgtagaactgctg

SEQ ID NO: 6052 - DNA, 25 bp, Artificial Sequence
  Synthetic Oligonucleotide
cagcagttctacgatggcaagtcct

SEQ ID NO: 6053 - DNA, 25 bp, Artificial Sequence
  Synthetic Oligonucleotide
gcgaaaaccggctgtctaagactac

SEQ ID NO: 6054 - DNA, 25 bp, Artificial Sequence
  Synthetic Oligonucleotide
tagaggaagtaccggacccacagaa

SEQ ID NO: 6055 - DNA, 25 bp, Artificial Sequence
  Synthetic Oligonucleotide
agtggtacaaccggtccgaccagaa

SEQ ID NO: 6056 - DNA, 25 bp, Artificial Sequence
  Synthetic Oligonucleotide
gtggtacaaccggtccgaccagaac

SEQ ID NO: 6057 - DNA, 25 bp, Artificial Sequence
  Synthetic Oligonucleotide
acatggcttcctaccgcaacgagac

SEQ ID NO: 6058 - DNA, 25 bp, Artificial Sequence
  Synthetic Oligonucleotide
agtggacctccatcacgcaactgac

SEQ ID NO: 6059 - DNA, 25 bp, Artificial Sequence
  Synthetic Oligonucleotide
aggacttgccatcgtagaactgctg

SEQ ID NO: 6060 - DNA, 25 bp, Artificial Sequence
  Synthetic Oligonucleotide
cagcagttctacgatggcaagtcct

SEQ ID NO: 6061 - DNA, 25 bp, Artificial Sequence
  Synthetic Oligonucleotide
tatctgcgcgttgttggaccaagac

SEQ ID NO: 6062 - DNA, 25 bp, Artificial Sequence
  Synthetic Oligonucleotide
ttctcggtgttcgtgagttccaatc

SEQ ID NO: 6063 - DNA, 25 bp, Artificial Sequence
  Synthetic Oligonucleotide
tctatgatggtacttttcaactatc

SEQ ID NO: 6064 - DNA, 25 bp, Artificial Sequence
  Synthetic Oligonucleotide
tcttgaatcacgcttacattaattc

SEQ ID NO: 6065 - DNA, 25 bp, Artificial Sequence
  Synthetic Oligonucleotide
ggtctgaattccaatgtgtaatgtc

SEQ ID NO: 6066 - DNA, 25 bp, Artificial Sequence
  Synthetic Oligonucleotide
ccctaatttccagacagtaaggtcg

SEQ ID NO: 6067 - DNA, 25 bp, Artificial Sequence
  Synthetic Oligonucleotide
cagcagttctacgatggcaagtcct

SEQ ID NO: 6068 - DNA, 25 bp, Artificial Sequence
  Synthetic Oligonucleotide
aggacttgccatcgtagaactgctg

SEQ ID NO: 6069 - DNA, 25 bp, Artificial Sequence
  Synthetic Oligonucleotide
gtagattgacgccgacggatggcac

SEQ ID NO: 6070 - DNA, 25 bp, Artificial Sequence
  Synthetic Oligonucleotide
ttttgattggactgagtgctgccag

SEQ ID NO: 6071 - DNA, 25 bp, Artificial Sequence
  Synthetic Oligonucleotide
gaacggccttcctggtagctgccag

SEQ ID NO: 6072 - DNA, 25 bp, Artificial Sequence
  Synthetic Oligonucleotide
cgaggagcctttcttgtgcttcaag

SEQ ID NO: 6073 - DNA, 25 bp, Artificial Sequence
  Synthetic Oligonucleotide
acgtaagggtttcttgagctgagaa

SEQ ID NO: 6074 - DNA, 25 bp, Artificial Sequence
  Synthetic Oligonucleotide
taaaagttgtatcttgcgttctaaa

SEQ ID NO: 6075 - DNA, 25 bp, Artificial Sequence
  Synthetic Oligonucleotide
gtaactgtggttcttgtttgtaccc

SEQ ID NO: 6076 - DNA, 25 bp, Artificial Sequence
  Synthetic Oligonucleotide
gtaacagtgtgcattctccatttcc

SEQ ID NO: 6077 - DNA, 25 bp, Artificial Sequence
  Synthetic Oligonucleotide
taacttggctgtaaggtcatttatc

SEQ ID NO: 6078 - DNA, 25 bp, Artificial Sequence
  Synthetic Oligonucleotide
tagttggccgttaagcaactgaaac

SEQ ID NO: 6079 - DNA, 25 bp, Artificial Sequence
  Synthetic Oligonucleotide
ttgtgtctgtgttcgtccacggaaa

SEQ ID NO: 6080 - DNA, 25 bp, Artificial Sequence
  Synthetic Oligonucleotide
cttggtcgatgaactaccaagctaa

SEQ ID NO: 6081 - DNA, 25 bp, Artificial Sequence
  Synthetic Oligonucleotide
ccaggtcgctgacgaccacgaggaa

SEQ ID NO: 6082 - DNA, 25 bp, Artificial Sequence
  Synthetic Oligonucleotide
gacctttcatcatcgaccaaaacat

SEQ ID NO: 6083 - DNA, 25 bp, Artificial Sequence
  Synthetic Oligonucleotide
cttacttcttcatggcgaactgaat

SEQ ID NO: 6084 - DNA, 25 bp, Artificial Sequence
  Synthetic Oligonucleotide
taacttcttctatctcgtcgccaaa

SEQ ID NO: 6085 - DNA, 25 bp, Artificial Sequence
  Synthetic Oligonucleotide
ctatctctttacgacgcctgcgcac

SEQ ID NO: 6086 - DNA, 25 bp, Artificial Sequence
  Synthetic Oligonucleotide
tgactgcgactagacgctttcgcac

SEQ ID NO: 6087 - DNA, 25 bp, Artificial Sequence
  Synthetic Oligonucleotide
tcatgttacacgtaggtgtccctac

SEQ ID NO: 6088 - DNA, 25 bp, Artificial Sequence
  Synthetic Oligonucleotide
tcccttcgaccgtagagttctgctc

SEQ ID NO: 6089 - DNA, 25 bp, Artificial Sequence
  Synthetic Oligonucleotide
cagcagttctacgatggcaagtcct

SEQ ID NO: 6090 - DNA, 25 bp, Artificial Sequence
  Synthetic Oligonucleotide
aggacttgccatcgtagaactgctg

SEQ ID NO: 6091 - DNA, 25 bp, Artificial Sequence
  Synthetic Oligonucleotide
ccgctctgtcgcggattcacagttc

SEQ ID NO: 6092 - DNA, 25 bp, Artificial Sequence
  Synthetic Oligonucleotide
atacgtcgtctggcacaaaccataa

SEQ ID NO: 6093 - DNA, 25 bp, Artificial Sequence
  Synthetic Oligonucleotide
ctcttggagagataacgacactaca

SEQ ID NO: 6094 - DNA, 25 bp, Artificial Sequence
  Synthetic Oligonucleotide
taatttcgacatgaaaaaccgagag

SEQ ID NO: 6095 - DNA, 25 bp, Artificial Sequence
  Synthetic Oligonucleotide
tctgtcgactaggtaaaatcgcaac

SEQ ID NO: 6096 - DNA, 25 bp, Artificial Sequence
  Synthetic Oligonucleotide
ttgtgtcgatgcaggaacgacggaa

SEQ ID NO: 6097 - DNA, 25 bp, Artificial Sequence
  Synthetic Oligonucleotide
tatttcgtgtaggggactcagacaa

SEQ ID NO: 6098 - DNA, 25 bp, Artificial Sequence
  Synthetic Oligonucleotide
tctgctcgagtgtgagacaccacaa

SEQ ID NO: 6099 - DNA, 25 bp, Artificial Sequence
  Synthetic Oligonucleotide
cccttccgagattgagatctcaaca

SEQ ID NO: 6100 - DNA, 25 bp, Artificial Sequence
  Synthetic Oligonucleotide
ctcggttggcatttttctcaacacg

SEQ ID NO: 6101 - DNA, 25 bp, Artificial Sequence
  Synthetic Oligonucleotide
ctttccgcgtgctttctccaaccgt

SEQ ID NO: 6102 - DNA, 25 bp, Artificial Sequence
  Synthetic Oligonucleotide
cctttctcctgtttcttccgtaagg

SEQ ID NO: 6103 - DNA, 25 bp, Artificial Sequence
  Synthetic Oligonucleotide
cctatacgccttggtccttctgagg

SEQ ID NO: 6104 - DNA, 25 bp, Artificial Sequence
  Synthetic Oligonucleotide
aatccttctttagaaccataggagg

SEQ ID NO: 6105 - DNA, 25 bp, Artificial Sequence
  Synthetic Oligonucleotide
gtccgttccttcacgaccgaaaagg

SEQ ID NO: 6106 - DNA, 25 bp, Artificial Sequence
  Synthetic Oligonucleotide
gacctaggcttcaccgctcgaaagg

SEQ ID NO: 6107 - DNA, 25 bp, Artificial Sequence
  Synthetic Oligonucleotide
cccgaccttccgacacgtgaaagag

SEQ ID NO: 6108 - DNA, 25 bp, Artificial Sequence
  Synthetic Oligonucleotide
caccagcaaccgaactagcatgaag

SEQ ID NO: 6109 - DNA, 25 bp, Artificial Sequence
  Synthetic Oligonucleotide
cccatcaacagcatcgcgcggaagt

SEQ ID NO: 6110 - DNA, 25 bp, Artificial Sequence
  Synthetic Oligonucleotide
aaactgagacagacgtagccagaca

SEQ ID NO: 6111 - DNA, 25 bp, Artificial Sequence
  Synthetic Oligonucleotide
cagcagttctacgatggcaagtcct

SEQ ID NO: 6112 - DNA, 25 bp, Artificial Sequence
  Synthetic Oligonucleotide
aggacttgccatcgtagaactgctg

SEQ ID NO: 6113 - DNA, 25 bp, Artificial Sequence
  Synthetic Oligonucleotide
cacggtggccgcctacgtccagttc

SEQ ID NO: 6114 - DNA, 25 bp, Artificial Sequence
  Synthetic Oligonucleotide
agcgctgccacgactacttcttgac

SEQ ID NO: 6115 - DNA, 25 bp, Artificial Sequence
  Synthetic Oligonucleotide
atcctcctctttgatggtactgact

SEQ ID NO: 6116 - DNA, 25 bp, Artificial Sequence
  Synthetic Oligonucleotide
atcacaaccttgatatggactacac

SEQ ID NO: 6117 - DNA, 25 bp, Artificial Sequence
  Synthetic Oligonucleotide
acacacaaacatacacatgatgtac

SEQ ID NO: 6118 - DNA, 25 bp, Artificial Sequence
  Synthetic Oligonucleotide
acaccaacgaccgtaaacttgagac

SEQ ID NO: 6119 - DNA, 25 bp, Artificial Sequence
  Synthetic Oligonucleotide
ctaccactacccaaaaggtaactac

SEQ ID NO: 6120 - DNA, 25 bp, Artificial Sequence
  Synthetic Oligonucleotide
tccctcgaacccaaagactgagaca

SEQ ID NO: 6121 - DNA, 25 bp, Artificial Sequence
  Synthetic Oligonucleotide
gacctgaactggaaagtattcgaca

SEQ ID NO: 6122 - DNA, 25 bp, Artificial Sequence
  Synthetic Oligonucleotide
gtcccagcttgatcaagttctacag

SEQ ID NO: 6123 - DNA, 25 bp, Artificial Sequence
  Synthetic Oligonucleotide
gtcgtgctgcctgaaagtgttctaa

SEQ ID NO: 6124 - DNA, 25 bp, Artificial Sequence
  Synthetic Oligonucleotide
gtcttagtgatttcaatagttcatc

SEQ ID NO: 6125 - DNA, 25 bp, Artificial Sequence
  Synthetic Oligonucleotide
ttacttccgatcacaaacctaatct

SEQ ID NO: 6126 - DNA, 25 bp, Artificial Sequence
  Synthetic Oligonucleotide
tctaagaccccgacgagaaaaatac

SEQ ID NO: 6127 - DNA, 25 bp, Artificial Sequence
  Synthetic Oligonucleotide
ccgttgcatccgatcgaagaggaaa

SEQ ID NO: 6128 - DNA, 25 bp, Artificial Sequence
  Synthetic Oligonucleotide
gcagctaggacgccgaaagcgaaac

SEQ ID NO: 6129 - DNA, 25 bp, Artificial Sequence
  Synthetic Oligonucleotide
cggtagcgcgaccgacataggcgaa

SEQ ID NO: 6130 - DNA, 25 bp, Artificial Sequence
  Synthetic Oligonucleotide
cgacgacgacgagacgaaggcgaca

SEQ ID NO: 6131 - DNA, 25 bp, Artificial Sequence
  Synthetic Oligonucleotide
gggtcgtcgactaacacaaggctaa

SEQ ID NO: 6132 - DNA, 25 bp, Artificial Sequence
  Synthetic Oligonucleotide
cggcgtaggactgccagaagtcgaa

SEQ ID NO: 6133 - DNA, 25 bp, Artificial Sequence
  Synthetic Oligonucleotide
cagcagttctacgatggcaagtcct

SEQ ID NO: 6134 - DNA, 25 bp, Artificial Sequence
  Synthetic Oligonucleotide
aggacttgccatcgtagaactgctg

SEQ ID NO: 6135 - DNA, 25 bp, Artificial Sequence
  Synthetic Oligonucleotide
cgtaaagtggcgttgtgtaccttaa

SEQ ID NO: 6136 - DNA, 25 bp, Artificial Sequence
  Synthetic Oligonucleotide
cgtaaagtggcgttgtgtaccttaa

SEQ ID NO: 6137 - DNA, 25 bp, Artificial Sequence
  Synthetic Oligonucleotide
actctaggtcggtgtgctcctcaca

SEQ ID NO: 6138 - DNA, 25 bp, Artificial Sequence
  Synthetic Oligonucleotide
actctaggtgtatacaaccttccat

SEQ ID NO: 6139 - DNA, 25 bp, Artificial Sequence
  Synthetic Oligonucleotide
cgtccgggaatataccgttctctac

SEQ ID NO: 6140 - DNA, 25 bp, Artificial Sequence
  Synthetic Oligonucleotide
ccgttcaaagttttcctctcgacac

SEQ ID NO: 6141 - DNA, 25 bp, Artificial Sequence
  Synthetic Oligonucleotide
ctgccaacaggtctgtctgagaccg

SEQ ID NO: 6142 - DNA, 25 bp, Artificial Sequence
  Synthetic Oligonucleotide
ctgctgtcccggagtgtctgtcaac

SEQ ID NO: 6143 - DNA, 25 bp, Artificial Sequence
  Synthetic Oligonucleotide
gtgccttccggttcggtcactcgaa

SEQ ID NO: 6144 - DNA, 25 bp, Artificial Sequence
  Synthetic Oligonucleotide
gggacctctgagtcggtcgccagac

SEQ ID NO: 6145 - DNA, 25 bp, Artificial Sequence
  Synthetic Oligonucleotide
agtgagacctttgatcaacgaccaa

SEQ ID NO: 6146 - DNA, 25 bp, Artificial Sequence
  Synthetic Oligonucleotide
cgggaccgtgtagttcaacccatac

SEQ ID NO: 6147 - DNA, 25 bp, Artificial Sequence
  Synthetic Oligonucleotide
gagagtaccgttgttaaactctttc

SEQ ID NO: 6148 - DNA, 25 bp, Artificial Sequence
  Synthetic Oligonucleotide
ttaagcttttgtaacgaacttgttc

SEQ ID NO: 6149 - DNA, 25 bp, Artificial Sequence
  Synthetic Oligonucleotide
tttaataggtgagaaaaaccttgtc

SEQ ID NO: 6150 - DNA, 25 bp, Artificial Sequence
  Synthetic Oligonucleotide
ctatgggagaaagagaacctagaac

SEQ ID NO: 6151 - DNA, 25 bp, Artificial Sequence
  Synthetic Oligonucleotide
atggaagaactagagcagtataaac

SEQ ID NO: 6152 - DNA, 25 bp, Artificial Sequence
  Synthetic Oligonucleotide
gttcgactactgtacgcgaatgatc

SEQ ID NO: 6153 - DNA, 25 bp, Artificial Sequence
  Synthetic Oligonucleotide
gtactgatattatcggatacttaac

SEQ ID NO: 6154 - DNA, 25 bp, Artificial Sequence
  Synthetic Oligonucleotide
cagccgtacatattcgagatcttaa

SEQ ID NO: 6155 - DNA, 25 bp, Artificial Sequence
  Synthetic Oligonucleotide
cagcagttctacgatggcaagtcct

SEQ ID NO: 6156 - DNA, 25 bp, Artificial Sequence
  Synthetic Oligonucleotide
aggacttgccatcgtagaactgctg

SEQ ID NO: 6157 - DNA, 25 bp, Artificial Sequence
  Synthetic Oligonucleotide
tacagtctaggtcttgcctatgtaa

SEQ ID NO: 6158 - DNA, 25 bp, Artificial Sequence
  Synthetic Oligonucleotide
cccgtctcctggatgtacccgtaaa

SEQ ID NO: 6159 - DNA, 25 bp, Artificial Sequence
  Synthetic Oligonucleotide
ccttctacctcgctttcgccactaa

SEQ ID NO: 6160 - DNA, 25 bp, Artificial Sequence
  Synthetic Oligonucleotide
atttacggtccgactacgtacccaa

SEQ ID NO: 6161 - DNA, 25 bp, Artificial Sequence
  Synthetic Oligonucleotide
tatacgacggcgacgtcgccttcac

SEQ ID NO: 6162 - DNA, 25 bp, Artificial Sequence
  Synthetic Oligonucleotide
cagcggacgtcacgtcgaccgtttc

SEQ ID NO: 6163 - DNA, 25 bp, Artificial Sequence
  Synthetic Oligonucleotide
ccaccagagcagtagcagtgtgtac

SEQ ID NO: 6164 - DNA, 25 bp, Artificial Sequence
  Synthetic Oligonucleotide
ccaccagagcagtagcagtgtgtac

SEQ ID NO: 6165 - DNA, 25 bp, Artificial Sequence
  Synthetic Oligonucleotide
cccgagcgcggcagcagaggtgtaa

SEQ ID NO: 6166 - DNA, 25 bp, Artificial Sequence
  Synthetic Oligonucleotide
caccgtacttcggcaagtagtagaa

SEQ ID NO: 6167 - DNA, 25 bp, Artificial Sequence
  Synthetic Oligonucleotide
cttctaactcgtggccaaacgtaaa

SEQ ID NO: 6168 - DNA, 25 bp, Artificial Sequence
  Synthetic Oligonucleotide
agtgaatcgtgtgccatatatcgaa

SEQ ID NO: 6169 - DNA, 25 bp, Artificial Sequence
  Synthetic Oligonucleotide
gagtaacgtagcgcgttatgtagaa

SEQ ID NO: 6170 - DNA, 25 bp, Artificial Sequence
  Synthetic Oligonucleotide
agtagttcacacccgtgttcttaaa

SEQ ID NO: 6171 - DNA, 25 bp, Artificial Sequence
  Synthetic Oligonucleotide
ggttgccgtaccacggtatttaaag

SEQ ID NO: 6172 - DNA, 25 bp, Artificial Sequence
  Synthetic Oligonucleotide
tctattccgttgatccgttttaaag

SEQ ID NO: 6173 - DNA, 25 bp, Artificial Sequence
  Synthetic Oligonucleotide
gtcatagcgtgggtcgcgttttaaa

SEQ ID NO: 6174 - DNA, 25 bp, Artificial Sequence
  Synthetic Oligonucleotide
gcgtctacgactcttccatcttcaa

SEQ ID NO: 6175 - DNA, 25 bp, Artificial Sequence
  Synthetic Oligonucleotide
agtccggactagcttgacatttttc

SEQ ID NO: 6176 - DNA, 25 bp, Artificial Sequence
  Synthetic Oligonucleotide
ctcggctgtagcatcctagtttttc

SEQ ID NO: 6177 - DNA, 25 bp, Artificial Sequence
  Synthetic Oligonucleotide
cagcagttctacgatggcaagtcct

SEQ ID NO: 6178 - DNA, 25 bp, Artificial Sequence
  Synthetic Oligonucleotide
aggacttgccatcgtagaactgctg

SEQ ID NO: 6179 - DNA, 25 bp, Artificial Sequence
  Synthetic Oligonucleotide
gcgaaaaccggcagtctaagactac

SEQ ID NO: 6180 - DNA, 25 bp, Artificial Sequence
  Synthetic Oligonucleotide
tagaggaagtacgggacccacagaa

SEQ ID NO: 6181 - DNA, 25 bp, Artificial Sequence
  Synthetic Oligonucleotide
agtggtacaacccgtccgaccagaa

SEQ ID NO: 6182 - DNA, 25 bp, Artificial Sequence
  Synthetic Oligonucleotide
gtggtacaaccgctccgaccagaac

SEQ ID NO: 6183 - DNA, 25 bp, Artificial Sequence
  Synthetic Oligonucleotide
acatggcttccttccgcaacgagac

SEQ ID NO: 6184 - DNA, 25 bp, Artificial Sequence
  Synthetic Oligonucleotide
agtggacctccaacacgcaactgac

SEQ ID NO: 6185 - DNA, 25 bp, Artificial Sequence
  Synthetic Oligonucleotide
cagcagttctacgatggcaagtcct

SEQ ID NO: 6186 - DNA, 25 bp, Artificial Sequence
  Synthetic Oligonucleotide
aggacttgccatcgtagaactgctg

SEQ ID NO: 6187 - DNA, 25 bp, Artificial Sequence
  Synthetic Oligonucleotide
ccacgccggcagaagctcgacgaaa

SEQ ID NO: 6188 - DNA, 25 bp, Artificial Sequence
  Synthetic Oligonucleotide
ccacgccggcaggagctcgacgaaa

SEQ ID NO: 6189 - DNA, 25 bp, Artificial Sequence
  Synthetic Oligonucleotide
accacggcggtctgtcgtgacacaa

SEQ ID NO: 6190 - DNA, 25 bp, Artificial Sequence
  Synthetic Oligonucleotide
ttaccacgccattcgttgtacaagc

SEQ ID NO: 6191 - DNA, 25 bp, Artificial Sequence
  Synthetic Oligonucleotide
gttccacgtcccaactaagaaagac

SEQ ID NO: 6192 - DNA, 25 bp, Artificial Sequence
  Synthetic Oligonucleotide
taactcgtcgccaaacgtaaagaac

SEQ ID NO: 6193 - DNA, 25 bp, Artificial Sequence
  Synthetic Oligonucleotide
caaaggtcgccgacatctagacgaa

SEQ ID NO: 6194 - DNA, 25 bp, Artificial Sequence
  Synthetic Oligonucleotide
cagaccttcgcaatcgacttaagaa

SEQ ID NO: 6195 - DNA, 25 bp, Artificial Sequence
  Synthetic Oligonucleotide
tggaattccgtaagatactttagaa

SEQ ID NO: 6196 - DNA, 25 bp, Artificial Sequence
  Synthetic Oligonucleotide
gtgtaacttccagagtttgtactaa

SEQ ID NO: 6197 - DNA, 25 bp, Artificial Sequence
  Synthetic Oligonucleotide
ggacatccaggtagttgtcgacgag

SEQ ID NO: 6198 - DNA, 25 bp, Artificial Sequence
  Synthetic Oligonucleotide
cgtactactgtcgtcgttttgcgaa

SEQ ID NO: 6199 - DNA, 25 bp, Artificial Sequence
  Synthetic Oligonucleotide
aagacgattgtagttttccggagat

SEQ ID NO: 6200 - DNA, 25 bp, Artificial Sequence
  Synthetic Oligonucleotide
aaaagaatccgactcttctaggaaa

SEQ ID NO: 6201 - DNA, 25 bp, Artificial Sequence
  Synthetic Oligonucleotide
ttaaataagggacactttgggactc

SEQ ID NO: 6202 - DNA, 25 bp, Artificial Sequence
  Synthetic Oligonucleotide
aacaatagggtacatttattcgatc

SEQ ID NO: 6203 - DNA, 25 bp, Artificial Sequence
  Synthetic Oligonucleotide
gaaaatagcaatcatcgaatttgtc

SEQ ID NO: 6204 - DNA, 25 bp, Artificial Sequence
  Synthetic Oligonucleotide
taatcagttaagaatagtcttcgtc

SEQ ID NO: 6205 - DNA, 25 bp, Artificial Sequence
  Synthetic Oligonucleotide
agttaacgttcttaagactttgtac

SEQ ID NO: 6206 - DNA, 25 bp, Artificial Sequence
  Synthetic Oligonucleotide
gacttagaaccagaactgtctgtac

SEQ ID NO: 6207 - DNA, 25 bp, Artificial Sequence
  Synthetic Oligonucleotide
cgtaatgcccgtacatcgcgttgac

SEQ ID NO: 6208 - DNA, 25 bp, Artificial Sequence
  Synthetic Oligonucleotide
cccgttctcgccactaaaggaagac

SEQ ID NO: 6209 - DNA, 25 bp, Artificial Sequence
  Synthetic Oligonucleotide
ctagcgtttcccacgggtcaaaggt

SEQ ID NO: 6210 - DNA, 25 bp, Artificial Sequence
  Synthetic Oligonucleotide
agttcttcccatcggtcacgaggat

SEQ ID NO: 6211 - DNA, 25 bp, Artificial Sequence
  Synthetic Oligonucleotide
gaccctcacacaagacatcagagaa

SEQ ID NO: 6212 - DNA, 25 bp, Artificial Sequence
  Synthetic Oligonucleotide
gatgctcagtattagcatggtcgaa

SEQ ID NO: 6213 - DNA, 25 bp, Artificial Sequence
  Synthetic Oligonucleotide
gaacgccataaatcatcggtacaac

SEQ ID NO: 6214 - DNA, 25 bp, Artificial Sequence
  Synthetic Oligonucleotide
gtacatccagtacatcaggcaccac

SEQ ID NO: 6215 - DNA, 25 bp, Artificial Sequence
  Synthetic Oligonucleotide
cacatcgggttctacgggaagtcac

SEQ ID NO: 6216 - DNA, 25 bp, Artificial Sequence
  Synthetic Oligonucleotide
tcacatcgggtcctacgggaactcc

SEQ ID NO: 6217 - DNA, 25 bp, Artificial Sequence
  Synthetic Oligonucleotide
ggtatggctggtactatggaaccac

SEQ ID NO: 6218 - DNA, 25 bp, Artificial Sequence
  Synthetic Oligonucleotide
ggtaaggctggtactgtggccacac

SEQ ID NO: 6219 - DNA, 25 bp, Artificial Sequence
  Synthetic Oligonucleotide
tggcgtggtgacgtgacgctctaac

SEQ ID NO: 6220 - DNA, 25 bp, Artificial Sequence
  Synthetic Oligonucleotide
ggtgcagtgtgaagtactacctcaa

SEQ ID NO: 6221 - DNA, 25 bp, Artificial Sequence
  Synthetic Oligonucleotide
tcggttcggggtacgatacccggac

SEQ ID NO: 6222 - DNA, 25 bp, Artificial Sequence
  Synthetic Oligonucleotide
tctttcgaaccgagaccagcggtac

SEQ ID NO: 6223 - DNA, 25 bp, Artificial Sequence
  Synthetic Oligonucleotide
atgttctttcggaactctaggcgac

SEQ ID NO: 6224 - DNA, 25 bp, Artificial Sequence
  Synthetic Oligonucleotide
actcgtttaaagggtcctggacact

SEQ ID NO: 6225 - DNA, 25 bp, Artificial Sequence
  Synthetic Oligonucleotide
taaagtttctaatgggcccggacag

SEQ ID NO: 6226 - DNA, 25 bp, Artificial Sequence
  Synthetic Oligonucleotide
taaagtttctaatgggcctggacag

SEQ ID NO: 6227 - DNA, 25 bp, Artificial Sequence
  Synthetic Oligonucleotide
cattatctatttcgccttgacgacg

SEQ ID NO: 6228 - DNA, 25 bp, Artificial Sequence
  Synthetic Oligonucleotide
tcaagtaccctaaaggatcctgacc

SEQ ID NO: 6229 - DNA, 25 bp, Artificial Sequence
  Synthetic Oligonucleotide
gacctaacccagaaggacttttaat

SEQ ID NO: 6230 - DNA, 25 bp, Artificial Sequence
  Synthetic Oligonucleotide
cgagcccggacgaaacttgtgagat

SEQ ID NO: 6231 - DNA, 25 bp, Artificial Sequence
  Synthetic Oligonucleotide
actgcctcagtctctacatggaagt

SEQ ID NO: 6232 - DNA, 25 bp, Artificial Sequence
  Synthetic Oligonucleotide
gaactgcctcagtctctacatggaa

SEQ ID NO: 6233 - DNA, 25 bp, Artificial Sequence
  Synthetic Oligonucleotide
atcgacgtttcgtctcagaaggtaa

SEQ ID NO: 6234 - DNA, 25 bp, Artificial Sequence
  Synthetic Oligonucleotide
aatgtactcttaacctaatgggaat

SEQ ID NO: 6235 - DNA, 25 bp, Artificial Sequence
  Synthetic Oligonucleotide
gtacctgacaccagtactcgggaag

SEQ ID NO: 6236 - DNA, 25 bp, Artificial Sequence
  Synthetic Oligonucleotide
tcgtcgagacctcactacgcgggaa

SEQ ID NO: 6237 - DNA, 25 bp, Artificial Sequence
  Synthetic Oligonucleotide
ccgacgtagtccgaacgcgggtaac

SEQ ID NO: 6238 - DNA, 25 bp, Artificial Sequence
  Synthetic Oligonucleotide
tcagccgaggtctccgaggggtaac

SEQ ID NO: 6239 - DNA, 25 bp, Artificial Sequence
  Synthetic Oligonucleotide
tacagctggcgacacaagcctagaa

SEQ ID NO: 6240 - DNA, 25 bp, Artificial Sequence
  Synthetic Oligonucleotide
aaaaacctgcaacgacagtttaaag

SEQ ID NO: 6241 - DNA, 25 bp, Artificial Sequence
  Synthetic Oligonucleotide
gaaccgactcccaggcagttgtcaa

SEQ ID NO: 6242 - DNA, 25 bp, Artificial Sequence
  Synthetic Oligonucleotide
acgccaccgcttgcgaatgctatac

SEQ ID NO: 6243 - DNA, 25 bp, Artificial Sequence
  Synthetic Oligonucleotide
gggaacctaccactccaagtgaaac

SEQ ID NO: 6244 - DNA, 25 bp, Artificial Sequence
  Synthetic Oligonucleotide
aacggaccttctagactagtgttaa

SEQ ID NO: 6245 - DNA, 25 bp, Artificial Sequence
  Synthetic Oligonucleotide
ttacggaacttcatcagtgatataa

SEQ ID NO: 6246 - DNA, 25 bp, Artificial Sequence
  Synthetic Oligonucleotide
tgttagaactccctcaacagtataa

SEQ ID NO: 6247 - DNA, 25 bp, Artificial Sequence
  Synthetic Oligonucleotide
ttttgaactacacttactcacgcaa

SEQ ID NO: 6248 - DNA, 25 bp, Artificial Sequence
  Synthetic Oligonucleotide
tttttatactaagttgcggtcgaac

SEQ ID NO: 6249 - DNA, 25 bp, Artificial Sequence
  Synthetic Oligonucleotide
ctttcttgcaacgaaggtcttagtc

SEQ ID NO: 6250 - DNA, 25 bp, Artificial Sequence
  Synthetic Oligonucleotide
tttctgccagtcgaagtttatagac

SEQ ID NO: 6251 - DNA, 25 bp, Artificial Sequence
  Synthetic Oligonucleotide
gttttgcgaaccccaatataagacg

SEQ ID NO: 6252 - DNA, 25 bp, Artificial Sequence
  Synthetic Oligonucleotide
cttccggacacggcaaaaagagtac

SEQ ID NO: 6253 - DNA, 25 bp, Artificial Sequence
  Synthetic Oligonucleotide
ggcctttccaacgacacaaagataa

SEQ ID NO: 6254 - DNA, 25 bp, Artificial Sequence
  Synthetic Oligonucleotide
gggtattccaagtacaaaattaacg

SEQ ID NO: 6255 - DNA, 25 bp, Artificial Sequence
  Synthetic Oligonucleotide
ttagcgcacacttacactcatttaa

SEQ ID NO: 6256 - DNA, 25 bp, Artificial Sequence
  Synthetic Oligonucleotide
atggcgccgacgaccgtggtctgaa

SEQ ID NO: 6257 - DNA, 25 bp, Artificial Sequence
  Synthetic Oligonucleotide
gtggtcacgacgacccttactacaa

SEQ ID NO: 6258 - DNA, 25 bp, Artificial Sequence
  Synthetic Oligonucleotide
tcgaggtaccggtcctcgaatgacc

SEQ ID NO: 6259 - DNA, 25 bp, Artificial Sequence
  Synthetic Oligonucleotide
gttcgaatactgggcgtgaatgacc

SEQ ID NO: 6260 - DNA, 25 bp, Artificial Sequence
  Synthetic Oligonucleotide
gagtcaagtagtcgaaggaaccccg

SEQ ID NO: 6261 - DNA, 25 bp, Artificial Sequence
  Synthetic Oligonucleotide
acgaggaaggtgtcgggatctatcc

SEQ ID NO: 6262 - DNA, 25 bp, Artificial Sequence
  Synthetic Oligonucleotide
cgacgaaaggtcgtttctagtttgc

SEQ ID NO: 6263 - DNA, 25 bp, Artificial Sequence
  Synthetic Oligonucleotide
gtcataccatgtctttgtttctgtc

SEQ ID NO: 6264 - DNA, 25 bp, Artificial Sequence
  Synthetic Oligonucleotide
gtcgtcttcaaacttctatgtttgc

SEQ ID NO: 6265 - DNA, 25 bp, Artificial Sequence
  Synthetic Oligonucleotide
tcgtgtcccatatatcgaagttttc

SEQ ID NO: 6266 - DNA, 25 bp, Artificial Sequence
  Synthetic Oligonucleotide
gtttccgacaagtacataatttatc

SEQ ID NO: 6267 - DNA, 25 bp, Artificial Sequence
  Synthetic Oligonucleotide
agtttaaaaggtcctcatctctgtc

SEQ ID NO: 6268 - DNA, 25 bp, Artificial Sequence
  Synthetic Oligonucleotide
tctttcatggtactgacttacgatt

SEQ ID NO: 6269 - DNA, 25 bp, Artificial Sequence
  Synthetic Oligonucleotide
tcgttatcagggtatcgtctatgaa

SEQ ID NO: 6270 - DNA, 25 bp, Artificial Sequence
  Synthetic Oligonucleotide
tcgtgaccatggtcgtctaggtgaa

SEQ ID NO: 6271 - DNA, 25 bp, Artificial Sequence
  Synthetic Oligonucleotide
ggagtcacatcgggtcctacgggaa

SEQ ID NO: 6272 - DNA, 25 bp, Artificial Sequence
  Synthetic Oligonucleotide
tgcagcaacgagtcgaccagttgaa

SEQ ID NO: 6273 - DNA, 25 bp, Artificial Sequence
  Synthetic Oligonucleotide
tagggctatccgtcagcatttaact

SEQ ID NO: 6274 - DNA, 25 bp, Artificial Sequence
  Synthetic Oligonucleotide
tgaggacttcttgcagttttgtaac

SEQ ID NO: 6275 - DNA, 25 bp, Artificial Sequence
  Synthetic Oligonucleotide
aagaaatgacttacatgctttagtc

SEQ ID NO: 6276 - DNA, 25 bp, Artificial Sequence
  Synthetic Oligonucleotide
gcgaataactatacgaattcaagtc

SEQ ID NO: 6277 - DNA, 25 bp, Artificial Sequence
  Synthetic Oligonucleotide
acataaaacttcagacacttaaatc

SEQ ID NO: 6278 - DNA, 25 bp, Artificial Sequence
  Synthetic Oligonucleotide
atgtgaacgaactacatgtaatatc

SEQ ID NO: 6279 - DNA, 25 bp, Artificial Sequence
  Synthetic Oligonucleotide
ggtcactgaacttcatagttataat

SEQ ID NO: 6280 - DNA, 25 bp, Artificial Sequence
  Synthetic Oligonucleotide
tcgtccgtcgaatccgaggtcagaa

SEQ ID NO: 6281 - DNA, 25 bp, Artificial Sequence
  Synthetic Oligonucleotide
ctccagtggagcagagacgacaaac

SEQ ID NO: 6282 - DNA, 25 bp, Artificial Sequence
  Synthetic Oligonucleotide
gcagtcgagcacagcactctacaac

SEQ ID NO: 6283 - DNA, 25 bp, Artificial Sequence
  Synthetic Oligonucleotide
gtcaggcgtcgagatcctcgtacac

SEQ ID NO: 6284 - DNA, 25 bp, Artificial Sequence
  Synthetic Oligonucleotide
gtcaacgactgagtagtagcttaac

SEQ ID NO: 6285 - DNA, 25 bp, Artificial Sequence
  Synthetic Oligonucleotide
ctacactactcggctgtagctccac

SEQ ID NO: 6286 - DNA, 25 bp, Artificial Sequence
  Synthetic Oligonucleotide
tcactaccgtacctgacaccagtac

SEQ ID NO: 6287 - DNA, 25 bp, Artificial Sequence
  Synthetic Oligonucleotide
caatcaaagtacatgtaccgaagac

SEQ ID NO: 6288 - DNA, 25 bp, Artificial Sequence
  Synthetic Oligonucleotide
ctcccgaacaactctactacgaaac

SEQ ID NO: 6289 - DNA, 25 bp, Artificial Sequence
  Synthetic Oligonucleotide
ctcccacgagaggaagacttacaac

SEQ ID NO: 6290 - DNA, 25 bp, Artificial Sequence
  Synthetic Oligonucleotide
ctcccacgagaggaagacctacaac

SEQ ID NO: 6291 - DNA, 25 bp, Artificial Sequence
  Synthetic Oligonucleotide
ccatcggacgacggaaacgccgaac

SEQ ID NO: 6292 - DNA, 25 bp, Artificial Sequence
  Synthetic Oligonucleotide
cgcgcggacgacggaaggaacctac

SEQ ID NO: 6293 - DNA, 25 bp, Artificial Sequence
  Synthetic Oligonucleotide
gtcgtccgggcggtacaggaattac

SEQ ID NO: 6294 - DNA, 25 bp, Artificial Sequence
  Synthetic Oligonucleotide
gggcagaggcctcaggtagtgttac

SEQ ID NO: 6295 - DNA, 25 bp, Artificial Sequence
  Synthetic Oligonucleotide
gggtgttacggcggtcttgtctgaa

SEQ ID NO: 6296 - DNA, 25 bp, Artificial Sequence
  Synthetic Oligonucleotide
ggggtcgtcgcgagtctctcttgaa

SEQ ID NO: 6297 - DNA, 25 bp, Artificial Sequence
  Synthetic Oligonucleotide
tgtacggacttccttgtcttttcaa

SEQ ID NO: 6298 - DNA, 25 bp, Artificial Sequence
  Synthetic Oligonucleotide
ttacgtcaatgtatcctttactcaa

SEQ ID NO: 6299 - DNA, 25 bp, Artificial Sequence
  Synthetic Oligonucleotide
gtaacagtatggtcctttactcgaa

SEQ ID NO: 6300 - DNA, 25 bp, Artificial Sequence
  Synthetic Oligonucleotide
gtaacagtatggtcctttactcgaa

SEQ ID NO: 6301 - DNA, 25 bp, Artificial Sequence
  Synthetic Oligonucleotide
gtaaagttgtcgtttcataatcaac

SEQ ID NO: 6302 - DNA, 25 bp, Artificial Sequence
  Synthetic Oligonucleotide
gttgaagtggcgtcttatttcttac

SEQ ID NO: 6303 - DNA, 25 bp, Artificial Sequence
  Synthetic Oligonucleotide
aacttgagcgacacttctacgtcac

SEQ ID NO: 6304 - DNA, 25 bp, Artificial Sequence
  Synthetic Oligonucleotide
acacgtagacgtacccttatgctac

SEQ ID NO: 6305 - DNA, 25 bp, Artificial Sequence
  Synthetic Oligonucleotide
ccaccacggtggtctgtcgtgacac

SEQ ID NO: 6306 - DNA, 25 bp, Artificial Sequence
  Synthetic Oligonucleotide
ccagcaacggtttctcactagactc

SEQ ID NO: 6307 - DNA, 25 bp, Artificial Sequence
  Synthetic Oligonucleotide
ggtgctaaccgtttccgacaagtac

SEQ ID NO: 6308 - DNA, 25 bp, Artificial Sequence
  Synthetic Oligonucleotide
aggcgaccaggttctcaacgtaaac

SEQ ID NO: 6309 - DNA, 25 bp, Artificial Sequence
  Synthetic Oligonucleotide
aggacccgaccttccgtcacgtgaa

SEQ ID NO: 6310 - DNA, 25 bp, Artificial Sequence
  Synthetic Oligonucleotide
aggcccgtccatcacgtctatcgaa

SEQ ID NO: 6311 - DNA, 25 bp, Artificial Sequence
  Synthetic Oligonucleotide
aggacttgccatcgtagaactgctg

SEQ ID NO: 6312 - DNA, 25 bp, Artificial Sequence
  Synthetic Oligonucleotide
cagcagttctacgatggcaagtcct

SEQ ID NO: 6313 - DNA, 25 bp, Artificial Sequence
  Synthetic Oligonucleotide
ccacgccggcagtagctcgacgaaa

SEQ ID NO: 6314 - DNA, 25 bp, Artificial Sequence
  Synthetic Oligonucleotide
ccacgccggcagcagctcgacgaaa

SEQ ID NO: 6315 - DNA, 25 bp, Artificial Sequence
  Synthetic Oligonucleotide
accacggcggtcagtcgtgacacaa

SEQ ID NO: 6316 - DNA, 25 bp, Artificial Sequence
  Synthetic Oligonucleotide
ttaccacgccatacgttgtacaagc

SEQ ID NO: 6317 - DNA, 25 bp, Artificial Sequence
  Synthetic Oligonucleotide
gttccacgtccctactaagaaagac

SEQ ID NO: 6318 - DNA, 25 bp, Artificial Sequence
  Synthetic Oligonucleotide
taactcgtcgcctaacgtaaagaac

SEQ ID NO: 6319 - DNA, 25 bp, Artificial Sequence
  Synthetic Oligonucleotide
caaaggtcgccgtcatctagacgaa

SEQ ID NO: 6320 - DNA, 25 bp, Artificial Sequence
  Synthetic Oligonucleotide
cagaccttcgcattcgacttaagaa

SEQ ID NO: 6321 - DNA, 25 bp, Artificial Sequence
  Synthetic Oligonucleotide
tggaattccgtatgatactttagaa

SEQ ID NO: 6322 - DNA, 25 bp, Artificial Sequence
  Synthetic Oligonucleotide
gtgtaacttccacagtttgtactaa

SEQ ID NO: 6323 - DNA, 25 bp, Artificial Sequence
  Synthetic Oligonucleotide
ggacatccaggttgttgtcgacgag

SEQ ID NO: 6324 - DNA, 25 bp, Artificial Sequence
  Synthetic Oligonucleotide
cgtactactgtcctcgttttgcgaa

SEQ ID NO: 6325 - DNA, 25 bp, Artificial Sequence
  Synthetic Oligonucleotide
aagacgattgtacttttccggagat

SEQ ID NO: 6326 - DNA, 25 bp, Artificial Sequence
  Synthetic Oligonucleotide
aaaagaatccgagtcttctaggaaa

SEQ ID NO: 6327 - DNA, 25 bp, Artificial Sequence
  Synthetic Oligonucleotide
ttaaataagggagactttgggactc

SEQ ID NO: 6328 - DNA, 25 bp, Artificial Sequence
  Synthetic Oligonucleotide
aacaatagggtagatttattcgatc

SEQ ID NO: 6329 - DNA, 25 bp, Artificial Sequence
  Synthetic Oligonucleotide
gaaaatagcaatgatcgaatttgtc

SEQ ID NO: 6330 - DNA, 25 bp, Artificial Sequence
  Synthetic Oligonucleotide
taatcagttaagtatagtcttcgtc

SEQ ID NO: 6331 - DNA, 25 bp, Artificial Sequence
  Synthetic Oligonucleotide
agttaacgttctaaagactttgtac

SEQ ID NO: 6332 - DNA, 25 bp, Artificial Sequence
  Synthetic Oligonucleotide
gacttagaaccacaactgtctgtac

SEQ ID NO: 6333 - DNA, 25 bp, Artificial Sequence
  Synthetic Oligonucleotide
cgtaatgcccgttcatcgcgttgac

SEQ ID NO: 6334 - DNA, 25 bp, Artificial Sequence
  Synthetic Oligonucleotide
cccgttctcgcctctaaaggaagac

SEQ ID NO: 6335 - DNA, 25 bp, Artificial Sequence
  Synthetic Oligonucleotide
ctagcgtttccctcgggtcaaaggt

SEQ ID NO: 6336 - DNA, 25 bp, Artificial Sequence
  Synthetic Oligonucleotide
agttcttcccatgggtcacgaggat

SEQ ID NO: 6337 - DNA, 25 bp, Artificial Sequence
  Synthetic Oligonucleotide
gaccctcacacatgacatcagagaa

SEQ ID NO: 6338 - DNA, 25 bp, Artificial Sequence
  Synthetic Oligonucleotide
gatgctcagtataagcatggtcgaa

SEQ ID NO: 6339 - DNA, 25 bp, Artificial Sequence
  Synthetic Oligonucleotide
gaacgccataaaacatcggtacaac

SEQ ID NO: 6340 - DNA, 25 bp, Artificial Sequence
  Synthetic Oligonucleotide
gtacatccagtagatcaggcaccac

SEQ ID NO: 6341 - DNA, 25 bp, Artificial Sequence
  Synthetic Oligonucleotide
cacatcgggttcaacgggaagtcac

SEQ ID NO: 6342 - DNA, 25 bp, Artificial Sequence
  Synthetic Oligonucleotide
tcacatcgggtcgtacgggaactcc

SEQ ID NO: 6343 - DNA, 25 bp, Artificial Sequence
  Synthetic Oligonucleotide
ggtatggctggttctatggaaccac

SEQ ID NO: 6344 - DNA, 25 bp, Artificial Sequence
  Synthetic Oligonucleotide
ggtaaggctggttctgtggccacac

SEQ ID NO: 6345 - DNA, 25 bp, Artificial Sequence
  Synthetic Oligonucleotide
tggcgtggtgacctgacgctctaac

SEQ ID NO: 6346 - DNA, 25 bp, Artificial Sequence
  Synthetic Oligonucleotide
ggtgcagtgtgatgtactacctcaa

SEQ ID NO: 6347 - DNA, 25 bp, Artificial Sequence
  Synthetic Oligonucleotide
tcggttcggggttcgatacccggac

SEQ ID NO: 6348 - DNA, 25 bp, Artificial Sequence
  Synthetic Oligonucleotide
tctttcgaaccgtgaccagcggtac

SEQ ID NO: 6349 - DNA, 25 bp, Artificial Sequence
  Synthetic Oligonucleotide
atgttctttcggtactctaggcgac

SEQ ID NO: 6350 - DNA, 25 bp, Artificial Sequence
  Synthetic Oligonucleotide
actcgtttaaagcgtcctggacact

SEQ ID NO: 6351 - DNA, 25 bp, Artificial Sequence
  Synthetic Oligonucleotide
taaagtttctaaagggcccggacag

SEQ ID NO: 6352 - DNA, 25 bp, Artificial Sequence
  Synthetic Oligonucleotide
taaagtttctaaagggcctggacag

SEQ ID NO: 6353 - DNA, 25 bp, Artificial Sequence
  Synthetic Oligonucleotide
cattatctatttggccttgacgacg

SEQ ID NO: 6354 - DNA, 25 bp, Artificial Sequence
  Synthetic Oligonucleotide
tcaagtaccctataggatcctgacc

SEQ ID NO: 6355 - DNA, 25 bp, Artificial Sequence
  Synthetic Oligonucleotide
gacctaacccagtaggacttttaat

SEQ ID NO: 6356 - DNA, 25 bp, Artificial Sequence
  Synthetic Oligonucleotide
cgagcccggacgtaacttgtgagat

SEQ ID NO: 6357 - DNA, 25 bp, Artificial Sequence
  Synthetic Oligonucleotide
actgcctcagtcactacatggaagt

SEQ ID NO: 6358 - DNA, 25 bp, Artificial Sequence
  Synthetic Oligonucleotide
gaactgcctcagactctacatggaa

SEQ ID NO: 6359 - DNA, 25 bp, Artificial Sequence
  Synthetic Oligonucleotide
atcgacgtttcgactcagaaggtaa

SEQ ID NO: 6360 - DNA, 25 bp, Artificial Sequence
  Synthetic Oligonucleotide
aatgtactcttatcctaatgggaat

SEQ ID NO: 6361 - DNA, 25 bp, Artificial Sequence
  Synthetic Oligonucleotide
gtacctgacacctgtactcgggaag

SEQ ID NO: 6362 - DNA, 25 bp, Artificial Sequence
  Synthetic Oligonucleotide
tcgtcgagacctgactacgcgggaa

SEQ ID NO: 6363 - DNA, 25 bp, Artificial Sequence
  Synthetic Oligonucleotide
ccgacgtagtcccaacgcgggtaac

SEQ ID NO: 6364 - DNA, 25 bp, Artificial Sequence
  Synthetic Oligonucleotide
tcagccgaggtcaccgaggggtaac

SEQ ID NO: 6365 - DNA, 25 bp, Artificial Sequence
  Synthetic Oligonucleotide
tacagctggcgagacaagcctagaa

SEQ ID NO: 6366 - DNA, 25 bp, Artificial Sequence
  Synthetic Oligonucleotide
aaaaacctgcaaggacagtttaaag

SEQ ID NO: 6367 - DNA, 25 bp, Artificial Sequence
  Synthetic Oligonucleotide
gaaccgactccctggcagttgtcaa

SEQ ID NO: 6368 - DNA, 25 bp, Artificial Sequence
  Synthetic Oligonucleotide
acgccaccgcttccgaatgctatac

SEQ ID NO: 6369 - DNA, 25 bp, Artificial Sequence
  Synthetic Oligonucleotide
gggaacctaccagtccaagtgaaac

SEQ ID NO: 6370 - DNA, 25 bp, Artificial Sequence
  Synthetic Oligonucleotide
aacggaccttcttgactagtgttaa

SEQ ID NO: 6371 - DNA, 25 bp, Artificial Sequence
  Synthetic Oligonucleotide
ttacggaacttcttcagtgatataa

SEQ ID NO: 6372 - DNA, 25 bp, Artificial Sequence
  Synthetic Oligonucleotide
tgttagaactccgtcaacagtataa

SEQ ID NO: 6373 - DNA, 25 bp, Artificial Sequence
  Synthetic Oligonucleotide
ttttgaactacagttactcacgcaa

SEQ ID NO: 6374 - DNA, 25 bp, Artificial Sequence
  Synthetic Oligonucleotide
tttttatactaacttgcggtcgaac

SEQ ID NO: 6375 - DNA, 25 bp, Artificial Sequence
  Synthetic Oligonucleotide
ctttcttgcaaccaaggtcttagtc

SEQ ID NO: 6376 - DNA, 25 bp, Artificial Sequence
  Synthetic Oligonucleotide
tttctgccagtccaagtttatagac

SEQ ID NO: 6377 - DNA, 25 bp, Artificial Sequence
  Synthetic Oligonucleotide
gttttgcgaaccgcaatataagacg

SEQ ID NO: 6378 - DNA, 25 bp, Artificial Sequence
  Synthetic Oligonucleotide
cttccggacacgccaaaaagagtac

SEQ ID NO: 6379 - DNA, 25 bp, Artificial Sequence
  Synthetic Oligonucleotide
ggcctttccaaccacacaaagataa

SEQ ID NO: 6380 - DNA, 25 bp, Artificial Sequence
  Synthetic Oligonucleotide
gggtattccaagaacaaaattaacg

SEQ ID NO: 6381 - DNA, 25 bp, Artificial Sequence
  Synthetic Oligonucleotide
ttagcgcacactaacactcatttaa

SEQ ID NO: 6382 - DNA, 25 bp, Artificial Sequence
  Synthetic Oligonucleotide
atggcgccgacgtccgtggtctgaa

SEQ ID NO: 6383 - DNA, 25 bp, Artificial Sequence
  Synthetic Oligonucleotide
gtggtcacgacgtcccttactacaa

SEQ ID NO: 6384 - DNA, 25 bp, Artificial Sequence
  Synthetic Oligonucleotide
tcgaggtaccggacctcgaatgacc

SEQ ID NO: 6385 - DNA, 25 bp, Artificial Sequence
  Synthetic Oligonucleotide
gttcgaatactgcgcgtgaatgacc

SEQ ID NO: 6386 - DNA, 25 bp, Artificial Sequence
  Synthetic Oligonucleotide
gagtcaagtagtggaaggaaccccg

SEQ ID NO: 6387 - DNA, 25 bp, Artificial Sequence
  Synthetic Oligonucleotide
acgaggaaggtgacgggatctatcc

SEQ ID NO: 6388 - DNA, 25 bp, Artificial Sequence
  Synthetic Oligonucleotide
cgacgaaaggtcctttctagtttgc

SEQ ID NO: 6389 - DNA, 25 bp, Artificial Sequence
  Synthetic Oligonucleotide
gtcataccatgtgtttgtttctgtc

SEQ ID NO: 6390 - DNA, 25 bp, Artificial Sequence
  Synthetic Oligonucleotide
gtcgtcttcaaagttctatgtttgc

SEQ ID NO: 6391 - DNA, 25 bp, Artificial Sequence
  Synthetic Oligonucleotide
tcgtgtcccataaatcgaagttttc

SEQ ID NO: 6392 - DNA, 25 bp, Artificial Sequence
  Synthetic Oligonucleotide
gtttccgacaagaacataatttatc

SEQ ID NO: 6393 - DNA, 25 bp, Artificial Sequence
  Synthetic Oligonucleotide
agtttaaaaggtgctcatctctgtc

SEQ ID NO: 6394 - DNA, 25 bp, Artificial Sequence
  Synthetic Oligonucleotide
tctttcatggtagtgacttacgatt

SEQ ID NO: 6395 - DNA, 25 bp, Artificial Sequence
  Synthetic Oligonucleotide
tcgttatcagggaatcgtctatgaa

SEQ ID NO: 6396 - DNA, 25 bp, Artificial Sequence
  Synthetic Oligonucleotide
tcgtgaccatggacgtctaggtgaa

SEQ ID NO: 6397 - DNA, 25 bp, Artificial Sequence
  Synthetic Oligonucleotide
ggagtcacatcgcgtcctacgggaa

SEQ ID NO: 6398 - DNA, 25 bp, Artificial Sequence
  Synthetic Oligonucleotide
tgcagcaacgagacgaccagttgaa

SEQ ID NO: 6399 - DNA, 25 bp, Artificial Sequence
  Synthetic Oligonucleotide
tagggctatccgacagcatttaact

SEQ ID NO: 6400 - DNA, 25 bp, Artificial Sequence
  Synthetic Oligonucleotide
tgaggacttcttccagttttgtaac

SEQ ID NO: 6401 - DNA, 25 bp, Artificial Sequence
  Synthetic Oligonucleotide
aagaaatgactttcatgctttagtc

SEQ ID NO: 6402 - DNA, 25 bp, Artificial Sequence
  Synthetic Oligonucleotide
gcgaataactattcgaattcaagtc

SEQ ID NO: 6403 - DNA, 25 bp, Artificial Sequence
  Synthetic Oligonucleotide
acataaaacttctgacacttaaatc

SEQ ID NO: 6404 - DNA, 25 bp, Artificial Sequence
  Synthetic Oligonucleotide
atgtgaacgaacaacatgtaatatc

SEQ ID NO: 6405 - DNA, 25 bp, Artificial Sequence
  Synthetic Oligonucleotide
ggtcactgaactacatagttataat

SEQ ID NO: 6406 - DNA, 25 bp, Artificial Sequence
  Synthetic Oligonucleotide
tcgtccgtcgaaaccgaggtcagaa

SEQ ID NO: 6407 - DNA, 25 bp, Artificial Sequence
  Synthetic Oligonucleotide
ctccagtggagctgagacgacaaac

SEQ ID NO: 6408 - DNA, 25 bp, Artificial Sequence
  Synthetic Oligonucleotide
gcagtcgagcactgcactctacaac

SEQ ID NO: 6409 - DNA, 25 bp, Artificial Sequence
  Synthetic Oligonucleotide
gtcaggcgtcgacatcctcgtacac

SEQ ID NO: 6410 - DNA, 25 bp, Artificial Sequence
  Synthetic Oligonucleotide
gtcaacgactgactagtagcttaac

SEQ ID NO: 6411 - DNA, 25 bp, Artificial Sequence
  Synthetic Oligonucleotide
ctacactactcgcctgtagctccac

SEQ ID NO: 6412 - DNA, 25 bp, Artificial Sequence
  Synthetic Oligonucleotide
tcactaccgtacgtgacaccagtac

SEQ ID NO: 6413 - DNA, 25 bp, Artificial Sequence
  Synthetic Oligonucleotide
caatcaaagtacttgtaccgaagac

SEQ ID NO: 6414 - DNA, 25 bp, Artificial Sequence
  Synthetic Oligonucleotide
ctcccgaacaacactactacgaaac

SEQ ID NO: 6415 - DNA, 25 bp, Artificial Sequence
  Synthetic Oligonucleotide
ctcccacgagagcaagacttacaac

SEQ ID NO: 6416 - DNA, 25 bp, Artificial Sequence
  Synthetic Oligonucleotide
ctcccacgagagcaagacctacaac

SEQ ID NO: 6417 - DNA, 25 bp, Artificial Sequence
  Synthetic Oligonucleotide
ccatcggacgaccgaaacgccgaac

SEQ ID NO: 6418 - DNA, 25 bp, Artificial Sequence
  Synthetic Oligonucleotide
cgcgcggacgaccgaaggaacctac

SEQ ID NO: 6419 - DNA, 25 bp, Artificial Sequence
  Synthetic Oligonucleotide
gtcgtccgggcgctacaggaattac

SEQ ID NO: 6420 - DNA, 25 bp, Artificial Sequence
  Synthetic Oligonucleotide
gggcagaggcctgaggtagtgttac

SEQ ID NO: 6421 - DNA, 25 bp, Artificial Sequence
  Synthetic Oligonucleotide
gggtgttacggccgtcttgtctgaa

SEQ ID NO: 6422 - DNA, 25 bp, Artificial Sequence
  Synthetic Oligonucleotide
ggggtcgtcgcgtgtctctcttgaa

SEQ ID NO: 6423 - DNA, 25 bp, Artificial Sequence
  Synthetic Oligonucleotide
tgtacggacttcgttgtcttttcaa

SEQ ID NO: 6424 - DNA, 25 bp, Artificial Sequence
  Synthetic Oligonucleotide
ttacgtcaatgtttcctttactcaa

SEQ ID NO: 6425 - DNA, 25 bp, Artificial Sequence
  Synthetic Oligonucleotide
gtaacagtatggacctttactcgaa

SEQ ID NO: 6426 - DNA, 25 bp, Artificial Sequence
  Synthetic Oligonucleotide
gtaacagtatggacctttactcgaa

SEQ ID NO: 6427 - DNA, 25 bp, Artificial Sequence
  Synthetic Oligonucleotide
gtaaagttgtcgattcataatcaac

SEQ ID NO: 6428 - DNA, 25 bp, Artificial Sequence
  Synthetic Oligonucleotide
gttgaagtggcgacttatttcttac

SEQ ID NO: 6429 - DNA, 25 bp, Artificial Sequence
  Synthetic Oligonucleotide
aacttgagcgactcttctacgtcac

SEQ ID NO: 6430 - DNA, 25 bp, Artificial Sequence
  Synthetic Oligonucleotide
acacgtagacgttcccttatgctac

SEQ ID NO: 6431 - DNA, 25 bp, Artificial Sequence
  Synthetic Oligonucleotide
ccaccacggtggactgtcgtgacac

SEQ ID NO: 6432 - DNA, 25 bp, Artificial Sequence
  Synthetic Oligonucleotide
ccagcaacggttactcactagactc

SEQ ID NO: 6433 - DNA, 25 bp, Artificial Sequence
  Synthetic Oligonucleotide
ggtgctaaccgtatccgacaagtac

SEQ ID NO: 6434 - DNA, 25 bp, Artificial Sequence
  Synthetic Oligonucleotide
aggcgaccaggtactcaacgtaaac

SEQ ID NO: 6435 - DNA, 25 bp, Artificial Sequence
  Synthetic Oligonucleotide
aggacccgacctaccgtcacgtgaa

SEQ ID NO: 6436 - DNA, 25 bp, Artificial Sequence
  Synthetic Oligonucleotide
aggcccgtccatgacgtctatcgaa

SEQ ID NO: 6437 - DNA, 25 bp, Artificial Sequence
  Synthetic Oligonucleotide
cagcagttctacgatggcaagtcct

SEQ ID NO: 6438 - DNA, 25 bp, Artificial Sequence
  Synthetic Oligonucleotide
aggacttgccatcgtagaactgctg

SEQ ID NO: 6439 - DNA, 25 bp, Artificial Sequence
  Synthetic Oligonucleotide
gaagggtaagagtcggaactgacac

SEQ ID NO: 6440 - DNA, 25 bp, Artificial Sequence
  Synthetic Oligonucleotide
ggaaatggagaaagcacactgttac

SEQ ID NO: 6441 - DNA, 25 bp, Artificial Sequence
  Synthetic Oligonucleotide
cactgtgtggtatttctacctagaa

SEQ ID NO: 6442 - DNA, 25 bp, Artificial Sequence
  Synthetic Oligonucleotide
cttgtgtctgtgtacgtccacggaa

SEQ ID NO: 6443 - DNA, 25 bp, Artificial Sequence
  Synthetic Oligonucleotide
cggagtcggcgtaggactcccagaa

SEQ ID NO: 6444 - DNA, 25 bp, Artificial Sequence
  Synthetic Oligonucleotide
ggtagttgtcgtcggggaccactaa

SEQ ID NO: 6445 - DNA, 25 bp, Artificial Sequence
  Synthetic Oligonucleotide
gtagtctgtgcgacggcggcaccaa

SEQ ID NO: 6446 - DNA, 25 bp, Artificial Sequence
  Synthetic Oligonucleotide
tctcgtaggtgtggaggctaaagat

SEQ ID NO: 6447 - DNA, 25 bp, Artificial Sequence
  Synthetic Oligonucleotide
ttacttaaggtcgaggcgaagtaac

SEQ ID NO: 6448 - DNA, 25 bp, Artificial Sequence
  Synthetic Oligonucleotide
atctagtttggtcctttgttaagac

SEQ ID NO: 6449 - DNA, 25 bp, Artificial Sequence
  Synthetic Oligonucleotide
ttcctttcgttaggtatctttaaag

SEQ ID NO: 6450 - DNA, 25 bp, Artificial Sequence
  Synthetic Oligonucleotide
cctttagtgtgtatctagtgactaa

SEQ ID NO: 6451 - DNA, 25 bp, Artificial Sequence
  Synthetic Oligonucleotide
ggcttctgtagtcctagccagctaa

SEQ ID NO: 6452 - DNA, 25 bp, Artificial Sequence
  Synthetic Oligonucleotide
agaggcgccagaacccgtggagcaa

SEQ ID NO: 6453 - DNA, 25 bp, Artificial Sequence
  Synthetic Oligonucleotide
gagacaacctcataggcttgagcaa

SEQ ID NO: 6454 - DNA, 25 bp, Artificial Sequence
  Synthetic Oligonucleotide
agacaacctcataggcttgagcaat

SEQ ID NO: 6455 - DNA, 25 bp, Artificial Sequence
  Synthetic Oligonucleotide
ggaaattcaaagtcggaacgctggt

SEQ ID NO: 6456 - DNA, 25 bp, Artificial Sequence
  Synthetic Oligonucleotide
gaatttcacgaaatgttaggcttct

SEQ ID NO: 6457 - DNA, 25 bp, Artificial Sequence
  Synthetic Oligonucleotide
gacccttactacaattttgaccggc

SEQ ID NO: 6458 - DNA, 25 bp, Artificial Sequence
  Synthetic Oligonucleotide
cacttgtacacctttaagaccggtc

SEQ ID NO: 6459 - DNA, 25 bp, Artificial Sequence
  Synthetic Oligonucleotide
gacgttttcactttcacagtctttc

SEQ ID NO: 6460 - DNA, 25 bp, Artificial Sequence
  Synthetic Oligonucleotide
gtcgtttctaactctttagtcagaa

SEQ ID NO: 6461 - DNA, 25 bp, Artificial Sequence
  Synthetic Oligonucleotide
tattacaacttacttcgtcgagaag

SEQ ID NO: 6462 - DNA, 25 bp, Artificial Sequence
  Synthetic Oligonucleotide
tttatcgaaaagacgtcgtcgagaa

SEQ ID NO: 6463 - DNA, 25 bp, Artificial Sequence
  Synthetic Oligonucleotide
tctgtaaccgaacttcgtccagaac

SEQ ID NO: 6464 - DNA, 25 bp, Artificial Sequence
  Synthetic Oligonucleotide
ggtgacccagagcttctccgacaac

SEQ ID NO: 6465 - DNA, 25 bp, Artificial Sequence
  Synthetic Oligonucleotide
taagagccggaactgacacggcaac

SEQ ID NO: 6466 - DNA, 25 bp, Artificial Sequence
  Synthetic Oligonucleotide
aaacgcgcggacgacggaaggaacc

SEQ ID NO: 6467 - DNA, 25 bp, Artificial Sequence
  Synthetic Oligonucleotide
tacgttgcggctaggaacgttcacc

SEQ ID NO: 6468 - DNA, 25 bp, Artificial Sequence
  Synthetic Oligonucleotide
cccccttacgggaggaacaggacct

SEQ ID NO: 6469 - DNA, 25 bp, Artificial Sequence
  Synthetic Oligonucleotide
aacgcccacgggtggaagagctacc

SEQ ID NO: 6470 - DNA, 25 bp, Artificial Sequence
  Synthetic Oligonucleotide
aaccacgcagttcgaagaccagtac

SEQ ID NO: 6471 - DNA, 25 bp, Artificial Sequence
  Synthetic Oligonucleotide
cagcgacggcgtcgaagccacgtac

SEQ ID NO: 6472 - DNA, 25 bp, Artificial Sequence
  Synthetic Oligonucleotide
accccaggtcgctgaggaccacgag

SEQ ID NO: 6473 - DNA, 25 bp, Artificial Sequence
  Synthetic Oligonucleotide
agttccgccagctggcgaaggcagc

SEQ ID NO: 6474 - DNA, 25 bp, Artificial Sequence
  Synthetic Oligonucleotide
ttgctatctacctggtgaaagcagc

SEQ ID NO: 6475 - DNA, 25 bp, Artificial Sequence
  Synthetic Oligonucleotide
ggctgctacttcgtacaaatcgacc

SEQ ID NO: 6476 - DNA, 25 bp, Artificial Sequence
  Synthetic Oligonucleotide
gtctcctttctcttgtaatctagcg

SEQ ID NO: 6477 - DNA, 25 bp, Artificial Sequence
  Synthetic Oligonucleotide
atgtccctgtcgtgtcggacctacc

SEQ ID NO: 6478 - DNA, 25 bp, Artificial Sequence
  Synthetic Oligonucleotide
cacgttccatggagaggcgctacct

SEQ ID NO: 6479 - DNA, 25 bp, Artificial Sequence
  Synthetic Oligonucleotide
aacttcaatttggagttcgttgact

SEQ ID NO: 6480 - DNA, 25 bp, Artificial Sequence
  Synthetic Oligonucleotide
agacaaccatctagcggtcccagac

SEQ ID NO: 6481 - DNA, 25 bp, Artificial Sequence
  Synthetic Oligonucleotide
taacatacctaaaagtccgggttaa

SEQ ID NO: 6482 - DNA, 25 bp, Artificial Sequence
  Synthetic Oligonucleotide
ctcacttctgaactaccgaagaaag

SEQ ID NO: 6483 - DNA, 25 bp, Artificial Sequence
  Synthetic Oligonucleotide
gggattctagttctccgggacgaag

SEQ ID NO: 6484 - DNA, 25 bp, Artificial Sequence
  Synthetic Oligonucleotide
ggggattctagttctccgggacgaa

SEQ ID NO: 6485 - DNA, 25 bp, Artificial Sequence
  Synthetic Oligonucleotide
aagacttactctatccgcgagagaa

SEQ ID NO: 6486 - DNA, 25 bp, Artificial Sequence
  Synthetic Oligonucleotide
aacgagaccactttctagggtagaa

SEQ ID NO: 6487 - DNA, 25 bp, Artificial Sequence
  Synthetic Oligonucleotide
gcatgaacggctgctacggctggaa

SEQ ID NO: 6488 - DNA, 25 bp, Artificial Sequence
  Synthetic Oligonucleotide
actgaaacggtcgaggtcgtcggaa

SEQ ID NO: 6489 - DNA, 25 bp, Artificial Sequence
  Synthetic Oligonucleotide
actacatgacccacgcgtcgtggaa

SEQ ID NO: 6490 - DNA, 25 bp, Artificial Sequence
  Synthetic Oligonucleotide
tcatgttgctaccactccgtgggaa

SEQ ID NO: 6491 - DNA, 25 bp, Artificial Sequence
  Synthetic Oligonucleotide
ctcaagttggttatattgctagaac

SEQ ID NO: 6492 - DNA, 25 bp, Artificial Sequence
  Synthetic Oligonucleotide
cgaaacgtggtcattcttgttagaa

SEQ ID NO: 6493 - DNA, 25 bp, Artificial Sequence
  Synthetic Oligonucleotide
ggaatgcctgtagctgtagtgtgaa

SEQ ID NO: 6494 - DNA, 25 bp, Artificial Sequence
  Synthetic Oligonucleotide
gacagtatccttggtgactgtataa

SEQ ID NO: 6495 - DNA, 25 bp, Artificial Sequence
  Synthetic Oligonucleotide
tacctacccggtctgagtagtataa

SEQ ID NO: 6496 - DNA, 25 bp, Artificial Sequence
  Synthetic Oligonucleotide
cgacaaccgcattgggtgtacgtaa

SEQ ID NO: 6497 - DNA, 25 bp, Artificial Sequence
  Synthetic Oligonucleotide
accaatcgtgctcgacgcagtagaa

SEQ ID NO: 6498 - DNA, 25 bp, Artificial Sequence
  Synthetic Oligonucleotide
ctcaaatctacgttgcggctaggaa

SEQ ID NO: 6499 - DNA, 25 bp, Artificial Sequence
  Synthetic Oligonucleotide
cgattttagctagtcgacagaagac

SEQ ID NO: 6500 - DNA, 25 bp, Artificial Sequence
  Synthetic Oligonucleotide
aaatcgttagagtcttgctagaaac

SEQ ID NO: 6501 - DNA, 25 bp, Artificial Sequence
  Synthetic Oligonucleotide
aaacgtggtcattcttgttagaaag

SEQ ID NO: 6502 - DNA, 25 bp, Artificial Sequence
  Synthetic Oligonucleotide
tacgtgttattccagtgttagaaac

SEQ ID NO: 6503 - DNA, 25 bp, Artificial Sequence
  Synthetic Oligonucleotide
tacatcttcgacggtatagtaaccg

SEQ ID NO: 6504 - DNA, 25 bp, Artificial Sequence
  Synthetic Oligonucleotide
cgaacctaccgctgtatgtaccgac

SEQ ID NO: 6505 - DNA, 25 bp, Artificial Sequence
  Synthetic Oligonucleotide
ttcgaaccgagaccagcggtaccac

SEQ ID NO: 6506 - DNA, 25 bp, Artificial Sequence
  Synthetic Oligonucleotide
tcactcgaagggcaagtcgagaccc

SEQ ID NO: 6507 - DNA, 25 bp, Artificial Sequence
  Synthetic Oligonucleotide
ttacgtcaatacgtcgaaccagccc

SEQ ID NO: 6508 - DNA, 25 bp, Artificial Sequence
  Synthetic Oligonucleotide
tcgacgccataggtccgccgagccc

SEQ ID NO: 6509 - DNA, 25 bp, Artificial Sequence
  Synthetic Oligonucleotide
ggtagcacagagtccctgcgccgac

SEQ ID NO: 6510 - DNA, 25 bp, Artificial Sequence
  Synthetic Oligonucleotide
cgctggctagtgacccggcctctac

SEQ ID NO: 6511 - DNA, 25 bp, Artificial Sequence
  Synthetic Oligonucleotide
cgtgaggatgtgcggcgagccacct

SEQ ID NO: 6512 - DNA, 25 bp, Artificial Sequence
  Synthetic Oligonucleotide
cgtgagaatgtgcggcgagccacct

SEQ ID NO: 6513 - DNA, 25 bp, Artificial Sequence
  Synthetic Oligonucleotide
gctggaagtggtagcacagagtccc

SEQ ID NO: 6514 - DNA, 25 bp, Artificial Sequence
  Synthetic Oligonucleotide
gaagaggaggtaatgaacaaactcc

SEQ ID NO: 6515 - DNA, 25 bp, Artificial Sequence
  Synthetic Oligonucleotide
caagaaggtggtgactaattctgac

SEQ ID NO: 6516 - DNA, 25 bp, Artificial Sequence
  Synthetic Oligonucleotide
agtagaggaggtacatcgtccgtaa

SEQ ID NO: 6517 - DNA, 25 bp, Artificial Sequence
  Synthetic Oligonucleotide
gtcaaggaggtacatcgttcgtaac

SEQ ID NO: 6518 - DNA, 25 bp, Artificial Sequence
  Synthetic Oligonucleotide
gttcaagaaggaaacacttgtacac

SEQ ID NO: 6519 - DNA, 25 bp, Artificial Sequence
  Synthetic Oligonucleotide
tagttataagcaggacattgtcgac

SEQ ID NO: 6520 - DNA, 25 bp, Artificial Sequence
  Synthetic Oligonucleotide
aaacttctatgtttgctattgtgac

SEQ ID NO: 6521 - DNA, 25 bp, Artificial Sequence
  Synthetic Oligonucleotide
gtgccgtagtggttgcttatggact

SEQ ID NO: 6522 - DNA, 25 bp, Artificial Sequence
  Synthetic Oligonucleotide
tctcggctgtagcttcctagttttt

SEQ ID NO: 6523 - DNA, 25 bp, Artificial Sequence
  Synthetic Oligonucleotide
tcgtcggacttgcagccttgcgtaa

SEQ ID NO: 6524 - DNA, 25 bp, Artificial Sequence
  Synthetic Oligonucleotide
cggcgtattggtcactttgtcgtaa

SEQ ID NO: 6525 - DNA, 25 bp, Artificial Sequence
  Synthetic Oligonucleotide
cgaaggcatggtcgacttttgaact

SEQ ID NO: 6526 - DNA, 25 bp, Artificial Sequence
  Synthetic Oligonucleotide
tcaaggaagtacaggcgattttggc

SEQ ID NO: 6527 - DNA, 25 bp, Artificial Sequence
  Synthetic Oligonucleotide
agaagagaatagcgatactttcggc

SEQ ID NO: 6528 - DNA, 25 bp, Artificial Sequence
  Synthetic Oligonucleotide
gcaacgatcgaacatctattcgatc

SEQ ID NO: 6529 - DNA, 25 bp, Artificial Sequence
  Synthetic Oligonucleotide
acgaatcgaaggctctagtctgctc

SEQ ID NO: 6530 - DNA, 25 bp, Artificial Sequence
  Synthetic Oligonucleotide
ttaccaagtagagtcgttgacgtct

SEQ ID NO: 6531 - DNA, 25 bp, Artificial Sequence
  Synthetic Oligonucleotide
gctctaccaacaacttcgatggtac

SEQ ID NO: 6532 - DNA, 25 bp, Artificial Sequence
  Synthetic Oligonucleotide
gtatgttccctaaattgtcatgatc

SEQ ID NO: 6533 - DNA, 25 bp, Artificial Sequence
  Synthetic Oligonucleotide
gtaatgtttcgtgaattttaagatc

SEQ ID NO: 6534 - DNA, 25 bp, Artificial Sequence
  Synthetic Oligonucleotide
aatgtcagcgtgagaaataactatc

SEQ ID NO: 6535 - DNA, 25 bp, Artificial Sequence
  Synthetic Oligonucleotide
tagttgtcagcaaaaaagttctatc

SEQ ID NO: 6536 - DNA, 25 bp, Artificial Sequence
  Synthetic Oligonucleotide
tgttataaaacataaaacttcagac

SEQ ID NO: 6537 - DNA, 25 bp, Artificial Sequence
  Synthetic Oligonucleotide
actagaactccgacaacagtatgaa

SEQ ID NO: 6538 - DNA, 25 bp, Artificial Sequence
  Synthetic Oligonucleotide
agtaactaccgctgttacaggtgaa

SEQ ID NO: 6539 - DNA, 25 bp, Artificial Sequence
  Synthetic Oligonucleotide
tagtatactccgtcggaagagctaa

SEQ ID NO: 6540 - DNA, 25 bp, Artificial Sequence
  Synthetic Oligonucleotide
tgtaacaacgttcgtacaagcgaac

SEQ ID NO: 6541 - DNA, 25 bp, Artificial Sequence
  Synthetic Oligonucleotide
ttagacaaagttgtcgtacaacaac

SEQ ID NO: 6542 - DNA, 25 bp, Artificial Sequence
  Synthetic Oligonucleotide
aataaaccgttctctacttatacac

SEQ ID NO: 6543 - DNA, 25 bp, Artificial Sequence
  Synthetic Oligonucleotide
acataacagaggttttagtgttcac

SEQ ID NO: 6544 - DNA, 25 bp, Artificial Sequence
  Synthetic Oligonucleotide
cgcgcacccgggtcttgtagattcc

SEQ ID NO: 6545 - DNA, 25 bp, Artificial Sequence
  Synthetic Oligonucleotide
gcgcacgccgggtcttgtagattcc

SEQ ID NO: 6546 - DNA, 25 bp, Artificial Sequence
  Synthetic Oligonucleotide
cgcacgtcggggcctgtagattccc

SEQ ID NO: 6547 - DNA, 25 bp, Artificial Sequence
  Synthetic Oligonucleotide
gcacgtcggggcctgtagattcccg

SEQ ID NO: 6548 - DNA, 25 bp, Artificial Sequence
  Synthetic Oligonucleotide
gcacctgccggctgttatcttcctt

SEQ ID NO: 6549 - DNA, 25 bp, Artificial Sequence
  Synthetic Oligonucleotide
taccgtatccagtgtttaccctctg

SEQ ID NO: 6550 - DNA, 25 bp, Artificial Sequence
  Synthetic Oligonucleotide
tttagctaagagttttaccgcactc

SEQ ID NO: 6551 - DNA, 25 bp, Artificial Sequence
  Synthetic Oligonucleotide
tgtatccagaagttcttcgcgctaa

SEQ ID NO: 6552 - DNA, 25 bp, Artificial Sequence
  Synthetic Oligonucleotide
tgtcagaagactcatcgtcactaac

SEQ ID NO: 6553 - DNA, 25 bp, Artificial Sequence
  Synthetic Oligonucleotide
atgtcgagtcacgtggtacttcaac

SEQ ID NO: 6554 - DNA, 25 bp, Artificial Sequence
  Synthetic Oligonucleotide
aggagaagtgagacctttcatcaac

SEQ ID NO: 6555 - DNA, 25 bp, Artificial Sequence
  Synthetic Oligonucleotide
cggtaatacttagttttgtccctaa

SEQ ID NO: 6556 - DNA, 25 bp, Artificial Sequence
  Synthetic Oligonucleotide
gacgaaatataggtttaataacccc

SEQ ID NO: 6557 - DNA, 25 bp, Artificial Sequence
  Synthetic Oligonucleotide
caaccttgttatggactacaccgcc

SEQ ID NO: 6558 - DNA, 25 bp, Artificial Sequence
  Synthetic Oligonucleotide
aaacctaatcttgaatcacggttac

SEQ ID NO: 6559 - DNA, 25 bp, Artificial Sequence
  Synthetic Oligonucleotide
agggcgaatatagatagcagcttct

SEQ ID NO: 6560 - DNA, 25 bp, Artificial Sequence
  Synthetic Oligonucleotide
gaggggagaagttccccagatgtac

SEQ ID NO: 6561 - DNA, 25 bp, Artificial Sequence
  Synthetic Oligonucleotide
aagaggtgacagtatccttggtgac

SEQ ID NO: 6562 - DNA, 25 bp, Artificial Sequence
  Synthetic Oligonucleotide
aggcctcaggtagtgttacggtcac

SEQ ID NO: 6563 - DNA, 25 bp, Artificial Sequence
  Synthetic Oligonucleotide
aggacttgccatcgtagaactgctg

SEQ ID NO: 6564 - DNA, 25 bp, Artificial Sequence
  Synthetic Oligonucleotide
cagcagttctacgatggcaagtcct

SEQ ID NO: 6565 - DNA, 25 bp, Artificial Sequence
  Synthetic Oligonucleotide
gaagggtaagagacggaactgacac

SEQ ID NO: 6566 - DNA, 25 bp, Artificial Sequence
  Synthetic Oligonucleotide
ggaaatggagaatgcacactgttac

SEQ ID NO: 6567 - DNA, 25 bp, Artificial Sequence
  Synthetic Oligonucleotide
cactgtgtggtaattctacctagaa

SEQ ID NO: 6568 - DNA, 25 bp, Artificial Sequence
  Synthetic Oligonucleotide
cttgtgtctgtgaacgtccacggaa

SEQ ID NO: 6569 - DNA, 25 bp, Artificial Sequence
  Synthetic Oligonucleotide
cggagtcggcgttggactcccagaa

SEQ ID NO: 6570 - DNA, 25 bp, Artificial Sequence
  Synthetic Oligonucleotide
ggtagttgtcgtgggggaccactaa

SEQ ID NO: 6571 - DNA, 25 bp, Artificial Sequence
  Synthetic Oligonucleotide
gtagtctgtgcgtcggcggcaccaa

SEQ ID NO: 6572 - DNA, 25 bp, Artificial Sequence
  Synthetic Oligonucleotide
tctcgtaggtgtcgaggctaaagat

SEQ ID NO: 6573 - DNA, 25 bp, Artificial Sequence
  Synthetic Oligonucleotide
ttacttaaggtccaggcgaagtaac

SEQ ID NO: 6574 - DNA, 25 bp, Artificial Sequence
  Synthetic Oligonucleotide
atctagtttggtgctttgttaagac

SEQ ID NO: 6575 - DNA, 25 bp, Artificial Sequence
  Synthetic Oligonucleotide
ttcctttcgttacgtatctttaaag

SEQ ID NO: 6576 - DNA, 25 bp, Artificial Sequence
  Synthetic Oligonucleotide
cctttagtgtgtttctagtgactaa

SEQ ID NO: 6577 - DNA, 25 bp, Artificial Sequence
  Synthetic Oligonucleotide
ggcttctgtagtgctagccagctaa

SEQ ID NO: 6578 - DNA, 25 bp, Artificial Sequence
  Synthetic Oligonucleotide
agaggcgccagatcccgtggagcaa

SEQ ID NO: 6579 - DNA, 25 bp, Artificial Sequence
  Synthetic Oligonucleotide
gagacaacctcaaaggcttgagcaa

SEQ ID NO: 6580 - DNA, 25 bp, Artificial Sequence
  Synthetic Oligonucleotide
agacaacctcattggcttgagcaat

SEQ ID NO: 6581 - DNA, 25 bp, Artificial Sequence
  Synthetic Oligonucleotide
ggaaattcaaagacggaacgctggt

SEQ ID NO: 6582 - DNA, 25 bp, Artificial Sequence
  Synthetic Oligonucleotide
gaatttcacgaattgttaggcttct

SEQ ID NO: 6583 - DNA, 25 bp, Artificial Sequence
  Synthetic Oligonucleotide
gacccttactactattttgaccggc

SEQ ID NO: 6584 - DNA, 25 bp, Artificial Sequence
  Synthetic Oligonucleotide
cacttgtacaccattaagaccggtc

SEQ ID NO: 6585 - DNA, 25 bp, Artificial Sequence
  Synthetic Oligonucleotide
gacgttttcactatcacagtctttc

SEQ ID NO: 6586 - DNA, 25 bp, Artificial Sequence
  Synthetic Oligonucleotide
gtcgtttctaacactttagtcagaa

SEQ ID NO: 6587 - DNA, 25 bp, Artificial Sequence
  Synthetic Oligonucleotide
tattacaacttagttcgtcgagaag

SEQ ID NO: 6588 - DNA, 25 bp, Artificial Sequence
  Synthetic Oligonucleotide
tttatcgaaaagtcgtcgtcgagaa

SEQ ID NO: 6589 - DNA, 25 bp, Artificial Sequence
  Synthetic Oligonucleotide
tctgtaaccgaagttcgtccagaac

SEQ ID NO: 6590 - DNA, 25 bp, Artificial Sequence
  Synthetic Oligonucleotide
ggtgacccagaggttctccgacaac

SEQ ID NO: 6591 - DNA, 25 bp, Artificial Sequence
  Synthetic Oligonucleotide
taagagccggaagtgacacggcaac

SEQ ID NO: 6592 - DNA, 25 bp, Artificial Sequence
  Synthetic Oligonucleotide
aaacgcgcggaccacggaaggaacc

SEQ ID NO: 6593 - DNA, 25 bp, Artificial Sequence
  Synthetic Oligonucleotide
tacgttgcggcttggaacgttcacc

SEQ ID NO: 6594 - DNA, 25 bp, Artificial Sequence
  Synthetic Oligonucleotide
cccccttacgggtggaacaggacct

SEQ ID NO: 6595 - DNA, 25 bp, Artificial Sequence
  Synthetic Oligonucleotide
aacgcccacgggaggaagagctacc

SEQ ID NO: 6596 - DNA, 25 bp, Artificial Sequence
  Synthetic Oligonucleotide
aaccacgcagttggaagaccagtac

SEQ ID NO: 6597 - DNA, 25 bp, Artificial Sequence
  Synthetic Oligonucleotide
cagcgacggcgtggaagccacgtac

SEQ ID NO: 6598 - DNA, 25 bp, Artificial Sequence
  Synthetic Oligonucleotide
accccaggtcgcagaggaccacgag

SEQ ID NO: 6599 - DNA, 25 bp, Artificial Sequence
  Synthetic Oligonucleotide
agttccgccagcaggcgaaggcagc

SEQ ID NO: 6600 - DNA, 25 bp, Artificial Sequence
  Synthetic Oligonucleotide
ttgctatctaccaggtgaaagcagc

SEQ ID NO: 6601 - DNA, 25 bp, Artificial Sequence
  Synthetic Oligonucleotide
ggctgctacttcctacaaatcgacc

SEQ ID NO: 6602 - DNA, 25 bp, Artificial Sequence
  Synthetic Oligonucleotide
gtctcctttctcatgtaatctagcg

SEQ ID NO: 6603 - DNA, 25 bp, Artificial Sequence
  Synthetic Oligonucleotide
atgtccctgtcgagtcggacctacc

SEQ ID NO: 6604 - DNA, 25 bp, Artificial Sequence
  Synthetic Oligonucleotide
cacgttccatggtgaggcgctacct

SEQ ID NO: 6605 - DNA, 25 bp, Artificial Sequence
  Synthetic Oligonucleotide
aacttcaatttgcagttcgttgact

SEQ ID NO: 6606 - DNA, 25 bp, Artificial Sequence
  Synthetic Oligonucleotide
agacaaccatcttgcggtcccagac

SEQ ID NO: 6607 - DNA, 25 bp, Artificial Sequence
  Synthetic Oligonucleotide
taacatacctaatagtccgggttaa

SEQ ID NO: 6608 - DNA, 25 bp, Artificial Sequence
  Synthetic Oligonucleotide
ctcacttctgaagtaccgaagaaag

SEQ ID NO: 6609 - DNA, 25 bp, Artificial Sequence
  Synthetic Oligonucleotide
gggattctagttgtccgggacgaag

SEQ ID NO: 6610 - DNA, 25 bp, Artificial Sequence
  Synthetic Oligonucleotide
ggggattctagtactccgggacgaa

SEQ ID NO: 6611 - DNA, 25 bp, Artificial Sequence
  Synthetic Oligonucleotide
aagacttactctttccgcgagagaa

SEQ ID NO: 6612 - DNA, 25 bp, Artificial Sequence
  Synthetic Oligonucleotide
aacgagaccactatctagggtagaa

SEQ ID NO: 6613 - DNA, 25 bp, Artificial Sequence
  Synthetic Oligonucleotide
gcatgaacggctcctacggctggaa

SEQ ID NO: 6614 - DNA, 25 bp, Artificial Sequence
  Synthetic Oligonucleotide
actgaaacggtccaggtcgtcggaa

SEQ ID NO: 6615 - DNA, 25 bp, Artificial Sequence
  Synthetic Oligonucleotide
actacatgaccctcgcgtcgtggaa

SEQ ID NO: 6616 - DNA, 25 bp, Artificial Sequence
  Synthetic Oligonucleotide
tcatgttgctacgactccgtgggaa

SEQ ID NO: 6617 - DNA, 25 bp, Artificial Sequence
  Synthetic Oligonucleotide
ctcaagttggttttattgctagaac

SEQ ID NO: 6618 - DNA, 25 bp, Artificial Sequence
  Synthetic Oligonucleotide
cgaaacgtggtctttcttgttagaa

SEQ ID NO: 6619 - DNA, 25 bp, Artificial Sequence
  Synthetic Oligonucleotide
ggaatgcctgtacctgtagtgtgaa

SEQ ID NO: 6620 - DNA, 25 bp, Artificial Sequence
  Synthetic Oligonucleotide
gacagtatccttcgtgactgtataa

SEQ ID NO: 6621 - DNA, 25 bp, Artificial Sequence
  Synthetic Oligonucleotide
tacctacccggtgtgagtagtataa

SEQ ID NO: 6622 - DNA, 25 bp, Artificial Sequence
  Synthetic Oligonucleotide
cgacaaccgcatagggtgtacgtaa

SEQ ID NO: 6623 - DNA, 25 bp, Artificial Sequence
  Synthetic Oligonucleotide
accaatcgtgctggacgcagtagaa

SEQ ID NO: 6624 - DNA, 25 bp, Artificial Sequence
  Synthetic Oligonucleotide
ctcaaatctacgatgcggctaggaa

SEQ ID NO: 6625 - DNA, 25 bp, Artificial Sequence
  Synthetic Oligonucleotide
cgattttagctactcgacagaagac

SEQ ID NO: 6626 - DNA, 25 bp, Artificial Sequence
  Synthetic Oligonucleotide
aaatcgttagagacttgctagaaac

SEQ ID NO: 6627 - DNA, 25 bp, Artificial Sequence
  Synthetic Oligonucleotide
aaacgtggtcatacttgttagaaag

SEQ ID NO: 6628 - DNA, 25 bp, Artificial Sequence
  Synthetic Oligonucleotide
tacgtgttattcgagtgttagaaac

SEQ ID NO: 6629 - DNA, 25 bp, Artificial Sequence
  Synthetic Oligonucleotide
tacatcttcgaccgtatagtaaccg

SEQ ID NO: 6630 - DNA, 25 bp, Artificial Sequence
  Synthetic Oligonucleotide
cgaacctaccgcagtatgtaccgac

SEQ ID NO: 6631 - DNA, 25 bp, Artificial Sequence
  Synthetic Oligonucleotide
ttcgaaccgagagcagcggtaccac

SEQ ID NO: 6632 - DNA, 25 bp, Artificial Sequence
  Synthetic Oligonucleotide
tcactcgaaggggaagtcgagaccc

SEQ ID NO: 6633 - DNA, 25 bp, Artificial Sequence
  Synthetic Oligonucleotide
ttacgtcaatacctcgaaccagccc

SEQ ID NO: 6634 - DNA, 25 bp, Artificial Sequence
  Synthetic Oligonucleotide
tcgacgccatagctccgccgagccc

SEQ ID NO: 6635 - DNA, 25 bp, Artificial Sequence
  Synthetic Oligonucleotide
ggtagcacagagaccctgcgccgac

SEQ ID NO: 6636 - DNA, 25 bp, Artificial Sequence
  Synthetic Oligonucleotide
cgctggctagtgtcccggcctctac

SEQ ID NO: 6637 - DNA, 25 bp, Artificial Sequence
  Synthetic Oligonucleotide
cgtgaggatgtggggcgagccacct

SEQ ID NO: 6638 - DNA, 25 bp, Artificial Sequence
  Synthetic Oligonucleotide
cgtgagaatgtggggcgagccacct

SEQ ID NO: 6639 - DNA, 25 bp, Artificial Sequence
  Synthetic Oligonucleotide
gctggaagtggttgcacagagtccc

SEQ ID NO: 6640 - DNA, 25 bp, Artificial Sequence
  Synthetic Oligonucleotide
gaagaggaggtattgaacaaactcc

SEQ ID NO: 6641 - DNA, 25 bp, Artificial Sequence
  Synthetic Oligonucleotide
caagaaggtggtcactaattctgac

SEQ ID NO: 6642 - DNA, 25 bp, Artificial Sequence
  Synthetic Oligonucleotide
agtagaggaggttcatcgtccgtaa

SEQ ID NO: 6643 - DNA, 25 bp, Artificial Sequence
  Synthetic Oligonucleotide
gtcaaggaggtagatcgttcgtaac

SEQ ID NO: 6644 - DNA, 25 bp, Artificial Sequence
  Synthetic Oligonucleotide
gttcaagaaggatacacttgtacac

SEQ ID NO: 6645 - DNA, 25 bp, Artificial Sequence
  Synthetic Oligonucleotide
tagttataagcacgacattgtcgac

SEQ ID NO: 6646 - DNA, 25 bp, Artificial Sequence
  Synthetic Oligonucleotide
aaacttctatgtatgctattgtgac

SEQ ID NO: 6647 - DNA, 25 bp, Artificial Sequence
  Synthetic Oligonucleotide
gtgccgtagtggatgcttatggact

SEQ ID NO: 6648 - DNA, 25 bp, Artificial Sequence
  Synthetic Oligonucleotide
tctcggctgtaggttcctagttttt

SEQ ID NO: 6649 - DNA, 25 bp, Artificial Sequence
  Synthetic Oligonucleotide
tcgtcggacttggagccttgcgtaa

SEQ ID NO: 6650 - DNA, 25 bp, Artificial Sequence
  Synthetic Oligonucleotide
cggcgtattggtgactttgtcgtaa

SEQ ID NO: 6651 - DNA, 25 bp, Artificial Sequence
  Synthetic Oligonucleotide
cgaaggcatggtggacttttgaact

SEQ ID NO: 6652 - DNA, 25 bp, Artificial Sequence
  Synthetic Oligonucleotide
tcaaggaagtactggcgattttggc

SEQ ID NO: 6653 - DNA, 25 bp, Artificial Sequence
  Synthetic Oligonucleotide
agaagagaatagggatactttcggc

SEQ ID NO: 6654 - DNA, 25 bp, Artificial Sequence
  Synthetic Oligonucleotide
gcaacgatcgaagatctattcgatc

SEQ ID NO: 6655 - DNA, 25 bp, Artificial Sequence
  Synthetic Oligonucleotide
acgaatcgaagggtctagtctgctc

SEQ ID NO: 6656 - DNA, 25 bp, Artificial Sequence
  Synthetic Oligonucleotide
ttaccaagtagactcgttgacgtct

SEQ ID NO: 6657 - DNA, 25 bp, Artificial Sequence
  Synthetic Oligonucleotide
gctctaccaacatcttcgatggtac

SEQ ID NO: 6658 - DNA, 25 bp, Artificial Sequence
  Synthetic Oligonucleotide
gtatgttccctatattgtcatgatc

SEQ ID NO: 6659 - DNA, 25 bp, Artificial Sequence
  Synthetic Oligonucleotide
gtaatgtttcgtcaattttaagatc

SEQ ID NO: 6660 - DNA, 25 bp, Artificial Sequence
  Synthetic Oligonucleotide
aatgtcagcgtgtgaaataactatc

SEQ ID NO: 6661 - DNA, 25 bp, Artificial Sequence
  Synthetic Oligonucleotide
tagttgtcagcataaaagttctatc

SEQ ID NO: 6662 - DNA, 25 bp, Artificial Sequence
  Synthetic Oligonucleotide
tgttataaaacaaaaaacttcagac

SEQ ID NO: 6663 - DNA, 25 bp, Artificial Sequence
  Synthetic Oligonucleotide
actagaactccgtcaacagtatgaa

SEQ ID NO: 6664 - DNA, 25 bp, Artificial Sequence
  Synthetic Oligonucleotide
agtaactaccgcagttacaggtgaa

SEQ ID NO: 6665 - DNA, 25 bp, Artificial Sequence
  Synthetic Oligonucleotide
tagtatactccgacggaagagctaa

SEQ ID NO: 6666 - DNA, 25 bp, Artificial Sequence
  Synthetic Oligonucleotide
tgtaacaacgttggtacaagcgaac

SEQ ID NO: 6667 - DNA, 25 bp, Artificial Sequence
  Synthetic Oligonucleotide
ttagacaaagttctcgtacaacaac

SEQ ID NO: 6668 - DNA, 25 bp, Artificial Sequence
  Synthetic Oligonucleotide
aataaaccgttcactacttatacac

SEQ ID NO: 6669 - DNA, 25 bp, Artificial Sequence
  Synthetic Oligonucleotide
acataacagaggatttagtgttcac

SEQ ID NO: 6670 - DNA, 25 bp, Artificial Sequence
  Synthetic Oligonucleotide
cgcgcacccgggacttgtagattcc

SEQ ID NO: 6671 - DNA, 25 bp, Artificial Sequence
  Synthetic Oligonucleotide
gcgcacgccgggacttgtagattcc

SEQ ID NO: 6672 - DNA, 25 bp, Artificial Sequence
  Synthetic Oligonucleotide
cgcacgtcgggggctgtagattccc

SEQ ID NO: 6673 - DNA, 25 bp, Artificial Sequence
  Synthetic Oligonucleotide
gcacgtcggggcgtgtagattcccg

SEQ ID NO: 6674 - DNA, 25 bp, Artificial Sequence
  Synthetic Oligonucleotide
gcacctgccggcagttatcttcctt

SEQ ID NO: 6675 - DNA, 25 bp, Artificial Sequence
  Synthetic Oligonucleotide
taccgtatccagagtttaccctctg

SEQ ID NO: 6676 - DNA, 25 bp, Artificial Sequence
  Synthetic Oligonucleotide
tttagctaagagatttaccgcactc

SEQ ID NO: 6677 - DNA, 25 bp, Artificial Sequence
  Synthetic Oligonucleotide
tgtatccagaagatcttcgcgctaa

SEQ ID NO: 6678 - DNA, 25 bp, Artificial Sequence
  Synthetic Oligonucleotide
tgtcagaagactgatcgtcactaac

SEQ ID NO: 6679 - DNA, 25 bp, Artificial Sequence
  Synthetic Oligonucleotide
atgtcgagtcacctggtacttcaac

SEQ ID NO: 6680 - DNA, 25 bp, Artificial Sequence
  Synthetic Oligonucleotide
aggagaagtgagtcctttcatcaac

SEQ ID NO: 6681 - DNA, 25 bp, Artificial Sequence
  Synthetic Oligonucleotide
cggtaatacttacttttgtccctaa

SEQ ID NO: 6682 - DNA, 25 bp, Artificial Sequence
  Synthetic Oligonucleotide
gacgaaatatagctttaataacccc

SEQ ID NO: 6683 - DNA, 25 bp, Artificial Sequence
  Synthetic Oligonucleotide
caaccttgttatcgactacaccgcc

SEQ ID NO: 6684 - DNA, 25 bp, Artificial Sequence
  Synthetic Oligonucleotide
aaacctaatcttcaatcacggttac

SEQ ID NO: 6685 - DNA, 25 bp, Artificial Sequence
  Synthetic Oligonucleotide
agggcgaatatacatagcagcttct

SEQ ID NO: 6686 - DNA, 25 bp, Artificial Sequence
  Synthetic Oligonucleotide
gaggggagaagtaccccagatgtac

SEQ ID NO: 6687 - DNA, 25 bp, Artificial Sequence
  Synthetic Oligonucleotide
aagaggtgacagaatccttggtgac

SEQ ID NO: 6688 - DNA, 25 bp, Artificial Sequence
  Synthetic Oligonucleotide
aggcctcaggtactgttacggtcac

SEQ ID NO: 6689 - DNA, 25 bp, Artificial Sequence
  Synthetic Oligonucleotide
cagcagttctacgatggcaagtcct

SEQ ID NO: 6690 - DNA, 25 bp, Artificial Sequence
  Synthetic Oligonucleotide
aggacttgccatcgtagaactgctg

SEQ ID NO: 6691 - DNA, 25 bp, Artificial Sequence
  Synthetic Oligonucleotide
tacgatcgacccaagtaatgtctac

SEQ ID NO: 6692 - DNA, 25 bp, Artificial Sequence
  Synthetic Oligonucleotide
agaaacgggagtccaagacatcttc

SEQ ID NO: 6693 - DNA, 25 bp, Artificial Sequence
  Synthetic Oligonucleotide
aagtggaagtggtcgtacaactaac

SEQ ID NO: 6694 - DNA, 25 bp, Artificial Sequence
  Synthetic Oligonucleotide
cattgttgtgtacgtctaccatgac

SEQ ID NO: 6695 - DNA, 25 bp, Artificial Sequence
  Synthetic Oligonucleotide
agatttcctctacgtctccagtgac

SEQ ID NO: 6696 - DNA, 25 bp, Artificial Sequence
  Synthetic Oligonucleotide
cggtcttcgtcctgcgtctccttaa

SEQ ID NO: 6697 - DNA, 25 bp, Artificial Sequence
  Synthetic Oligonucleotide
gaaccgttcacctcgttccgtcaat

SEQ ID NO: 6698 - DNA, 25 bp, Artificial Sequence
  Synthetic Oligonucleotide
aaaccgatctcctcggttcgtcaac

SEQ ID NO: 6699 - DNA, 25 bp, Artificial Sequence
  Synthetic Oligonucleotide
aactctaggcgaccaggttctcaac

SEQ ID NO: 6700 - DNA, 25 bp, Artificial Sequence
  Synthetic Oligonucleotide
cgcctttgcgagtcgtggttaccac

SEQ ID NO: 6701 - DNA, 25 bp, Artificial Sequence
  Synthetic Oligonucleotide
ggtcctttactcgaactgtttcaac

SEQ ID NO: 6702 - DNA, 25 bp, Artificial Sequence
  Synthetic Oligonucleotide
gttgttgtacgacaactttgtctaa

SEQ ID NO: 6703 - DNA, 25 bp, Artificial Sequence
  Synthetic Oligonucleotide
tttagttcagtcatctacgtctccg

SEQ ID NO: 6704 - DNA, 25 bp, Artificial Sequence
  Synthetic Oligonucleotide
ctatatattcaggttgttacatacg

SEQ ID NO: 6705 - DNA, 25 bp, Artificial Sequence
  Synthetic Oligonucleotide
gattcatgttatctacgtttgcaac

SEQ ID NO: 6706 - DNA, 25 bp, Artificial Sequence
  Synthetic Oligonucleotide
gatatacccttgacatgtttcacag

SEQ ID NO: 6707 - DNA, 25 bp, Artificial Sequence
  Synthetic Oligonucleotide
agtacaagcaagacattataccttg

SEQ ID NO: 6708 - DNA, 25 bp, Artificial Sequence
  Synthetic Oligonucleotide
aaattcaaggactgtgtctgcgttg

SEQ ID NO: 6709 - DNA, 25 bp, Artificial Sequence
  Synthetic Oligonucleotide
gtcttttacaacacagtttcctgtg

SEQ ID NO: 6710 - DNA, 25 bp, Artificial Sequence
  Synthetic Oligonucleotide
cttttacaacacagtttcctgtgac

SEQ ID NO: 6711 - DNA, 25 bp, Artificial Sequence
  Synthetic Oligonucleotide
gtatttagctaaatttcgcttgtac

SEQ ID NO: 6712 - DNA, 25 bp, Artificial Sequence
  Synthetic Oligonucleotide
gcatttacgttaaaggttctttgac

SEQ ID NO: 6713 - DNA, 25 bp, Artificial Sequence
  Synthetic Oligonucleotide
tggtcgttataaggtttcatcgtac

SEQ ID NO: 6714 - DNA, 25 bp, Artificial Sequence
  Synthetic Oligonucleotide
tttctgtataagacgtttagtcgac

SEQ ID NO: 6715 - DNA, 25 bp, Artificial Sequence
  Synthetic Oligonucleotide
tagcgccgcaagtcgttcgagttac

SEQ ID NO: 6716 - DNA, 25 bp, Artificial Sequence
  Synthetic Oligonucleotide
gcgtccaacgagtcgtgcgtgagtc

SEQ ID NO: 6717 - DNA, 25 bp, Artificial Sequence
  Synthetic Oligonucleotide
gtgctgcatgagtcgcggtcgtagc

SEQ ID NO: 6718 - DNA, 25 bp, Artificial Sequence
  Synthetic Oligonucleotide
cgcgtcaatctaccaccgcggtagc

SEQ ID NO: 6719 - DNA, 25 bp, Artificial Sequence
  Synthetic Oligonucleotide
cgctcgacttagtaacgctgactac

SEQ ID NO: 6720 - DNA, 25 bp, Artificial Sequence
  Synthetic Oligonucleotide
gccagacgggagaacgcgcgactac

SEQ ID NO: 6721 - DNA, 25 bp, Artificial Sequence
  Synthetic Oligonucleotide
cggcgtccgaggtgaggaccaccac

SEQ ID NO: 6722 - DNA, 25 bp, Artificial Sequence
  Synthetic Oligonucleotide
cggcgtccgaggtgaggaccaccac

SEQ ID NO: 6723 - DNA, 25 bp, Artificial Sequence
  Synthetic Oligonucleotide
gaagagcgccaatcggaaccccaac

SEQ ID NO: 6724 - DNA, 25 bp, Artificial Sequence
  Synthetic Oligonucleotide
aggacgtctaagtccatgcccaagt

SEQ ID NO: 6725 - DNA, 25 bp, Artificial Sequence
  Synthetic Oligonucleotide
tggacgttgggctagcgctccagct

SEQ ID NO: 6726 - DNA, 25 bp, Artificial Sequence
  Synthetic Oligonucleotide
ggccgtgtcaggtgtcgacccagtc

SEQ ID NO: 6727 - DNA, 25 bp, Artificial Sequence
  Synthetic Oligonucleotide
ggtttagtggtggtccgacaccctc

SEQ ID NO: 6728 - DNA, 25 bp, Artificial Sequence
  Synthetic Oligonucleotide
gtttttcgttgcagcgatacttgcg

SEQ ID NO: 6729 - DNA, 25 bp, Artificial Sequence
  Synthetic Oligonucleotide
gtcggttcagttctgcctcctaccg

SEQ ID NO: 6730 - DNA, 25 bp, Artificial Sequence
  Synthetic Oligonucleotide
gattcacagttctcggctcttccgt

SEQ ID NO: 6731 - DNA, 25 bp, Artificial Sequence
  Synthetic Oligonucleotide
cgattcacagttctcggctcttccg

SEQ ID NO: 6732 - DNA, 25 bp, Artificial Sequence
  Synthetic Oligonucleotide
gcgcatccattggacggaccatcgc

SEQ ID NO: 6733 - DNA, 25 bp, Artificial Sequence
  Synthetic Oligonucleotide
ccgatagcaatggacgcgtggttgc

SEQ ID NO: 6734 - DNA, 25 bp, Artificial Sequence
  Synthetic Oligonucleotide
ttccgtcttcaacagcggcggctgc

SEQ ID NO: 6735 - DNA, 25 bp, Artificial Sequence
  Synthetic Oligonucleotide
atcaccataaagtgaccgcggcttc

SEQ ID NO: 6736 - DNA, 25 bp, Artificial Sequence
  Synthetic Oligonucleotide
tagtcattctagtgcaggtcggttc

SEQ ID NO: 6737 - DNA, 25 bp, Artificial Sequence
  Synthetic Oligonucleotide
tgacattctcgcacacgggcgtaac

SEQ ID NO: 6738 - DNA, 25 bp, Artificial Sequence
  Synthetic Oligonucleotide
cacggtcccgtcactagaggaagac

SEQ ID NO: 6739 - DNA, 25 bp, Artificial Sequence
  Synthetic Oligonucleotide
cccggtctcgccactagaggaagac

SEQ ID NO: 6740 - DNA, 25 bp, Artificial Sequence
  Synthetic Oligonucleotide
ctcctgcgcggcaccggtagaggac

SEQ ID NO: 6741 - DNA, 25 bp, Artificial Sequence
  Synthetic Oligonucleotide
tcctacgccgtcaccggtagaggac

SEQ ID NO: 6742 - DNA, 25 bp, Artificial Sequence
  Synthetic Oligonucleotide
taggtccgccgagcccggacgaaac

SEQ ID NO: 6743 - DNA, 25 bp, Artificial Sequence
  Synthetic Oligonucleotide
tagtctgctctagcccgcgcaagtc

SEQ ID NO: 6744 - DNA, 25 bp, Artificial Sequence
  Synthetic Oligonucleotide
tcgttagctcttccaccgtcagaac

SEQ ID NO: 6745 - DNA, 25 bp, Artificial Sequence
  Synthetic Oligonucleotide
gcctaagccgcaccagtcgtcaaac

SEQ ID NO: 6746 - DNA, 25 bp, Artificial Sequence
  Synthetic Oligonucleotide
ccatgccggtaggaggtcgacgaac

SEQ ID NO: 6747 - DNA, 25 bp, Artificial Sequence
  Synthetic Oligonucleotide
ccacgccggtaggaggtcgacgaac

SEQ ID NO: 6748 - DNA, 25 bp, Artificial Sequence
  Synthetic Oligonucleotide
ccacgccggtaggagttcgacgaac

SEQ ID NO: 6749 - DNA, 25 bp, Artificial Sequence
  Synthetic Oligonucleotide
ccacagcatctagagtctgaggtac

SEQ ID NO: 6750 - DNA, 25 bp, Artificial Sequence
  Synthetic Oligonucleotide
tcaaatctacgttgcggctaggaac

SEQ ID NO: 6751 - DNA, 25 bp, Artificial Sequence
  Synthetic Oligonucleotide
tacaacattagtcgttcacaagccg

SEQ ID NO: 6752 - DNA, 25 bp, Artificial Sequence
  Synthetic Oligonucleotide
gaaacgaaagtttgaaccgcagccc

SEQ ID NO: 6753 - DNA, 25 bp, Artificial Sequence
  Synthetic Oligonucleotide
aaacaaagttagcattgttgaccac

SEQ ID NO: 6754 - DNA, 25 bp, Artificial Sequence
  Synthetic Oligonucleotide
ccagaattagctgtcgttgcacgac

SEQ ID NO: 6755 - DNA, 25 bp, Artificial Sequence
  Synthetic Oligonucleotide
ccgaagttgttcagcgtgagccgtc

SEQ ID NO: 6756 - DNA, 25 bp, Artificial Sequence
  Synthetic Oligonucleotide
aggtgacttcttgacgagaaccgac

SEQ ID NO: 6757 - DNA, 25 bp, Artificial Sequence
  Synthetic Oligonucleotide
gtcctgcgtctccttaaagtaccac

SEQ ID NO: 6758 - DNA, 25 bp, Artificial Sequence
  Synthetic Oligonucleotide
tgacaccgatcgagttacaaacaac

SEQ ID NO: 6759 - DNA, 25 bp, Artificial Sequence
  Synthetic Oligonucleotide
gcccactcgcaccagtatataagtc

SEQ ID NO: 6760 - DNA, 25 bp, Artificial Sequence
  Synthetic Oligonucleotide
accactactggaccggcagtccgtc

SEQ ID NO: 6761 - DNA, 25 bp, Artificial Sequence
  Synthetic Oligonucleotide
acccgagggacctggacgtgtcgtc

SEQ ID NO: 6762 - DNA, 25 bp, Artificial Sequence
  Synthetic Oligonucleotide
actgctatcggaccaagcggtcgac

SEQ ID NO: 6763 - DNA, 25 bp, Artificial Sequence
  Synthetic Oligonucleotide
ccagcaacacgacacgtgcggtgac

SEQ ID NO: 6764 - DNA, 25 bp, Artificial Sequence
  Synthetic Oligonucleotide
cgaaagacggacacgtagacgggac

SEQ ID NO: 6765 - DNA, 25 bp, Artificial Sequence
  Synthetic Oligonucleotide
tcgaaagattattcgtacagttcac

SEQ ID NO: 6766 - DNA, 25 bp, Artificial Sequence
  Synthetic Oligonucleotide
aatgaatgttatggtacaagctaac

SEQ ID NO: 6767 - DNA, 25 bp, Artificial Sequence
  Synthetic Oligonucleotide
taagaaccgtttacgaaagcgagac

SEQ ID NO: 6768 - DNA, 25 bp, Artificial Sequence
  Synthetic Oligonucleotide
cagaaacggcacacgttactggaac

SEQ ID NO: 6769 - DNA, 25 bp, Artificial Sequence
  Synthetic Oligonucleotide
agtataaccgggtgcgataggaacg

SEQ ID NO: 6770 - DNA, 25 bp, Artificial Sequence
  Synthetic Oligonucleotide
agaagaaaggggcgactaagacggt

SEQ ID NO: 6771 - DNA, 25 bp, Artificial Sequence
  Synthetic Oligonucleotide
cgaagatgaggcccgcactaggctt

SEQ ID NO: 6772 - DNA, 25 bp, Artificial Sequence
  Synthetic Oligonucleotide
catattaaggaatgcctgtagctgt

SEQ ID NO: 6773 - DNA, 25 bp, Artificial Sequence
  Synthetic Oligonucleotide
catgttcaggaatgcctatagttac

SEQ ID NO: 6774 - DNA, 25 bp, Artificial Sequence
  Synthetic Oligonucleotide
atgtgtagtgtatttgcctaattac

SEQ ID NO: 6775 - DNA, 25 bp, Artificial Sequence
  Synthetic Oligonucleotide
cttgagagttggaggttacactaac

SEQ ID NO: 6776 - DNA, 25 bp, Artificial Sequence
  Synthetic Oligonucleotide
ctcgggaaggtgttacggtttcaac

SEQ ID NO: 6777 - DNA, 25 bp, Artificial Sequence
  Synthetic Oligonucleotide
gtttgggagttgttacggcttcaac

SEQ ID NO: 6778 - DNA, 25 bp, Artificial Sequence
  Synthetic Oligonucleotide
gtctgggagctattatggtttcaac

SEQ ID NO: 6779 - DNA, 25 bp, Artificial Sequence
  Synthetic Oligonucleotide
ttcagggagttattaaggcttcaac

SEQ ID NO: 6780 - DNA, 25 bp, Artificial Sequence
  Synthetic Oligonucleotide
gaggttattatctgagcgtttaacc

SEQ ID NO: 6781 - DNA, 25 bp, Artificial Sequence
  Synthetic Oligonucleotide
gacctataacattaggcggttgcac

SEQ ID NO: 6782 - DNA, 25 bp, Artificial Sequence
  Synthetic Oligonucleotide
tctgtaacgacttaatcgggttaac

SEQ ID NO: 6783 - DNA, 25 bp, Artificial Sequence
  Synthetic Oligonucleotide
ccttaagctagactgcggtgtcgac

SEQ ID NO: 6784 - DNA, 25 bp, Artificial Sequence
  Synthetic Oligonucleotide
aagcccttccgctattgcagtgcct

SEQ ID NO: 6785 - DNA, 25 bp, Artificial Sequence
  Synthetic Oligonucleotide
gcgatggtccgtccaatggatgcgc

SEQ ID NO: 6786 - DNA, 25 bp, Artificial Sequence
  Synthetic Oligonucleotide
ggcggtcgcaagttagactcggtac

SEQ ID NO: 6787 - DNA, 25 bp, Artificial Sequence
  Synthetic Oligonucleotide
aatgaacgccataaatcatcggtac

SEQ ID NO: 6788 - DNA, 25 bp, Artificial Sequence
  Synthetic Oligonucleotide
gaaagaatcaacaaaacgccgagtc

SEQ ID NO: 6789 - DNA, 25 bp, Artificial Sequence
  Synthetic Oligonucleotide
aaaagaccaactcatcggccgcgac

SEQ ID NO: 6790 - DNA, 25 bp, Artificial Sequence
  Synthetic Oligonucleotide
tacgtaaagtacaatcgtgcccgac

SEQ ID NO: 6791 - DNA, 25 bp, Artificial Sequence
  Synthetic Oligonucleotide
gttgatctagccgcgtcgcctcgac

SEQ ID NO: 6792 - DNA, 25 bp, Artificial Sequence
  Synthetic Oligonucleotide
agcgagacagcgggtccgacctcac

SEQ ID NO: 6793 - DNA, 25 bp, Artificial Sequence
  Synthetic Oligonucleotide
agtgagacatctagtctgaccgaac

SEQ ID NO: 6794 - DNA, 25 bp, Artificial Sequence
  Synthetic Oligonucleotide
gagttaaagtctcaccttccgtcac

SEQ ID NO: 6795 - DNA, 25 bp, Artificial Sequence
  Synthetic Oligonucleotide
gacagactaaaggtacccttttgac

SEQ ID NO: 6796 - DNA, 25 bp, Artificial Sequence
  Synthetic Oligonucleotide
cgacggaaacgccgaacattttcac

SEQ ID NO: 6797 - DNA, 25 bp, Artificial Sequence
  Synthetic Oligonucleotide
ccccagagcgaggaccttctaccac

SEQ ID NO: 6798 - DNA, 25 bp, Artificial Sequence
  Synthetic Oligonucleotide
ccctagagcgaggaccttctaccac

SEQ ID NO: 6799 - DNA, 25 bp, Artificial Sequence
  Synthetic Oligonucleotide
cgactaggtgtagacgaccttccac

SEQ ID NO: 6800 - DNA, 25 bp, Artificial Sequence
  Synthetic Oligonucleotide
gtaccggtgactcgatagtatccac

SEQ ID NO: 6801 - DNA, 25 bp, Artificial Sequence
  Synthetic Oligonucleotide
acgttgcggctaggaacgttcacct

SEQ ID NO: 6802 - DNA, 25 bp, Artificial Sequence
  Synthetic Oligonucleotide
aaggtcctcgaaggtaaggctactc

SEQ ID NO: 6803 - DNA, 25 bp, Artificial Sequence
  Synthetic Oligonucleotide
tagattcccgtagtgtctggacaat

SEQ ID NO: 6804 - DNA, 25 bp, Artificial Sequence
  Synthetic Oligonucleotide
gattgaggtacctgtctgtgatcac

SEQ ID NO: 6805 - DNA, 25 bp, Artificial Sequence
  Synthetic Oligonucleotide
tagttcgagatcgtgtttgaacgac

SEQ ID NO: 6806 - DNA, 25 bp, Artificial Sequence
  Synthetic Oligonucleotide
agaagtgagacctttcatcaacgac

SEQ ID NO: 6807 - DNA, 25 bp, Artificial Sequence
  Synthetic Oligonucleotide
ttactcgaactgtttcaacagtaac

SEQ ID NO: 6808 - DNA, 25 bp, Artificial Sequence
  Synthetic Oligonucleotide
atatacgtgaagtggtctaacattc

SEQ ID NO: 6809 - DNA, 25 bp, Artificial Sequence
  Synthetic Oligonucleotide
gacattcataaatggacacacaaac

SEQ ID NO: 6810 - DNA, 25 bp, Artificial Sequence
  Synthetic Oligonucleotide
ggaaactcaaagttggaacgccagc

SEQ ID NO: 6811 - DNA, 25 bp, Artificial Sequence
  Synthetic Oligonucleotide
gaccgaagtgggataagtccgtatc

SEQ ID NO: 6812 - DNA, 25 bp, Artificial Sequence
  Synthetic Oligonucleotide
gaggtaatgaacaaactcctactac

SEQ ID NO: 6813 - DNA, 25 bp, Artificial Sequence
  Synthetic Oligonucleotide
agagggaccgaaagtattcggtaac

SEQ ID NO: 6814 - DNA, 25 bp, Artificial Sequence
  Synthetic Oligonucleotide
aggcggtccgaaatggaccgttacg

SEQ ID NO: 6815 - DNA, 25 bp, Artificial Sequence
  Synthetic Oligonucleotide
aggacttgccatcgtagaactgctg

SEQ ID NO: 6816 - DNA, 25 bp, Artificial Sequence
  Synthetic Oligonucleotide
cagcagttctacgatggcaagtcct

SEQ ID NO: 6817 - DNA, 25 bp, Artificial Sequence
  Synthetic Oligonucleotide
tacgatcgaccctagtaatgtctac

SEQ ID NO: 6818 - DNA, 25 bp, Artificial Sequence
  Synthetic Oligonucleotide
agaaacgggagtgcaagacatcttc

SEQ ID NO: 6819 - DNA, 25 bp, Artificial Sequence
  Synthetic Oligonucleotide
aagtggaagtggacgtacaactaac

SEQ ID NO: 6820 - DNA, 25 bp, Artificial Sequence
  Synthetic Oligonucleotide
cattgttgtgtaggtctaccatgac

SEQ ID NO: 6821 - DNA, 25 bp, Artificial Sequence
  Synthetic Oligonucleotide
agatttcctctaggtctccagtgac

SEQ ID NO: 6822 - DNA, 25 bp, Artificial Sequence
  Synthetic Oligonucleotide
cggtcttcgtccagcgtctccttaa

SEQ ID NO: 6823 - DNA, 25 bp, Artificial Sequence
  Synthetic Oligonucleotide
gaaccgttcaccacgttccgtcaat

SEQ ID NO: 6824 - DNA, 25 bp, Artificial Sequence
  Synthetic Oligonucleotide
aaaccgatctccacggttcgtcaac

SEQ ID NO: 6825 - DNA, 25 bp, Artificial Sequence
  Synthetic Oligonucleotide
aactctaggcgagcaggttctcaac

SEQ ID NO: 6826 - DNA, 25 bp, Artificial Sequence
  Synthetic Oligonucleotide
cgcctttgcgagacgtggttaccac

SEQ ID NO: 6827 - DNA, 25 bp, Artificial Sequence
  Synthetic Oligonucleotide
ggtcctttactccaactgtttcaac

SEQ ID NO: 6828 - DNA, 25 bp, Artificial Sequence
  Synthetic Oligonucleotide
gttgttgtacgagaactttgtctaa

SEQ ID NO: 6829 - DNA, 25 bp, Artificial Sequence
  Synthetic Oligonucleotide
tttagttcagtcttctacgtctccg

SEQ ID NO: 6830 - DNA, 25 bp, Artificial Sequence
  Synthetic Oligonucleotide
ctatatattcagcttgttacatacg

SEQ ID NO: 6831 - DNA, 25 bp, Artificial Sequence
  Synthetic Oligonucleotide
gattcatgttatgtacgtttgcaac

SEQ ID NO: 6832 - DNA, 25 bp, Artificial Sequence
  Synthetic Oligonucleotide
gatatacccttgtcatgtttcacag

SEQ ID NO: 6833 - DNA, 25 bp, Artificial Sequence
  Synthetic Oligonucleotide
agtacaagcaagtcattataccttg

SEQ ID NO: 6834 - DNA, 25 bp, Artificial Sequence
  Synthetic Oligonucleotide
aaattcaaggacagtgtctgcgttg

SEQ ID NO: 6835 - DNA, 25 bp, Artificial Sequence
  Synthetic Oligonucleotide
gtcttttacaactcagtttcctgtg

SEQ ID NO: 6836 - DNA, 25 bp, Artificial Sequence
  Synthetic Oligonucleotide
cttttacaacactgtttcctgtgac

SEQ ID NO: 6837 - DNA, 25 bp, Artificial Sequence
  Synthetic Oligonucleotide
gtatttagctaattttcgcttgtac

SEQ ID NO: 6838 - DNA, 25 bp, Artificial Sequence
  Synthetic Oligonucleotide
gcatttacgttataggttctttgac

SEQ ID NO: 6839 - DNA, 25 bp, Artificial Sequence
  Synthetic Oligonucleotide
tggtcgttataacgtttcatcgtac

SEQ ID NO: 6840 - DNA, 25 bp, Artificial Sequence
  Synthetic Oligonucleotide
tttctgtataagtcgtttagtcgac

SEQ ID NO: 6841 - DNA, 25 bp, Artificial Sequence
  Synthetic Oligonucleotide
tagcgccgcaagacgttcgagttac

SEQ ID NO: 6842 - DNA, 25 bp, Artificial Sequence
  Synthetic Oligonucleotide
gcgtccaacgagacgtgcgtgagtc

SEQ ID NO: 6843 - DNA, 25 bp, Artificial Sequence
  Synthetic Oligonucleotide
gtgctgcatgagacgcggtcgtagc

SEQ ID NO: 6844 - DNA, 25 bp, Artificial Sequence
  Synthetic Oligonucleotide
cgcgtcaatctagcaccgcggtagc

SEQ ID NO: 6845 - DNA, 25 bp, Artificial Sequence
  Synthetic Oligonucleotide
cgctcgacttagaaacgctgactac

SEQ ID NO: 6846 - DNA, 25 bp, Artificial Sequence
  Synthetic Oligonucleotide
gccagacgggagtacgcgcgactac

SEQ ID NO: 6847 - DNA, 25 bp, Artificial Sequence
  Synthetic Oligonucleotide
cggcgtccgaggagaggaccaccac

SEQ ID NO: 6848 - DNA, 25 bp, Artificial Sequence
  Synthetic Oligonucleotide
cggcgtccgaggagaggaccaccac

SEQ ID NO: 6849 - DNA, 25 bp, Artificial Sequence
  Synthetic Oligonucleotide
gaagagcgccaaacggaaccccaac

SEQ ID NO: 6850 - DNA, 25 bp, Artificial Sequence
  Synthetic Oligonucleotide
aggacgtctaagaccatgcccaagt

SEQ ID NO: 6851 - DNA, 25 bp, Artificial Sequence
  Synthetic Oligonucleotide
tggacgttgggcaagcgctccagct

SEQ ID NO: 6852 - DNA, 25 bp, Artificial Sequence
  Synthetic Oligonucleotide
ggccgtgtcaggagtcgacccagtc

SEQ ID NO: 6853 - DNA, 25 bp, Artificial Sequence
  Synthetic Oligonucleotide
ggtttagtggtgctccgacaccctc

SEQ ID NO: 6854 - DNA, 25 bp, Artificial Sequence
  Synthetic Oligonucleotide
gtttttcgttgctgcgatacttgcg

SEQ ID NO: 6855 - DNA, 25 bp, Artificial Sequence
  Synthetic Oligonucleotide
gtcggttcagttgtgcctcctaccg

SEQ ID NO: 6856 - DNA, 25 bp, Artificial Sequence
  Synthetic Oligonucleotide
gattcacagttcacggctcttccgt

SEQ ID NO: 6857 - DNA, 25 bp, Artificial Sequence
  Synthetic Oligonucleotide
cgattcacagttgtcggctcttccg

SEQ ID NO: 6858 - DNA, 25 bp, Artificial Sequence
  Synthetic Oligonucleotide
gcgcatccattgcacggaccatcgc

SEQ ID NO: 6859 - DNA, 25 bp, Artificial Sequence
  Synthetic Oligonucleotide
ccgatagcaatgcacgcgtggttgc

SEQ ID NO: 6860 - DNA, 25 bp, Artificial Sequence
  Synthetic Oligonucleotide
ttccgtcttcaagagcggcggctgc

SEQ ID NO: 6861 - DNA, 25 bp, Artificial Sequence
  Synthetic Oligonucleotide
atcaccataaagagaccgcggcttc

SEQ ID NO: 6862 - DNA, 25 bp, Artificial Sequence
  Synthetic Oligonucleotide
tagtcattctagagcaggtcggttc

SEQ ID NO: 6863 - DNA, 25 bp, Artificial Sequence
  Synthetic Oligonucleotide
tgacattctcgctcacgggcgtaac

SEQ ID NO: 6864 - DNA, 25 bp, Artificial Sequence
  Synthetic Oligonucleotide
cacggtcccgtctctagaggaagac

SEQ ID NO: 6865 - DNA, 25 bp, Artificial Sequence
  Synthetic Oligonucleotide
cccggtctcgcctctagaggaagac

SEQ ID NO: 6866 - DNA, 25 bp, Artificial Sequence
  Synthetic Oligonucleotide
ctcctgcgcggctccggtagaggac

SEQ ID NO: 6867 - DNA, 25 bp, Artificial Sequence
  Synthetic Oligonucleotide
tcctacgccgtctccggtagaggac

SEQ ID NO: 6868 - DNA, 25 bp, Artificial Sequence
  Synthetic Oligonucleotide
taggtccgccgaccccggacgaaac

SEQ ID NO: 6869 - DNA, 25 bp, Artificial Sequence
  Synthetic Oligonucleotide
tagtctgctctaccccgcgcaagtc

SEQ ID NO: 6870 - DNA, 25 bp, Artificial Sequence
  Synthetic Oligonucleotide
tcgttagctcttgcaccgtcagaac

SEQ ID NO: 6871 - DNA, 25 bp, Artificial Sequence
  Synthetic Oligonucleotide
gcctaagccgcagcagtcgtcaaac

SEQ ID NO: 6872 - DNA, 25 bp, Artificial Sequence
  Synthetic Oligonucleotide
ccatgccggtagcaggtcgacgaac

SEQ ID NO: 6873 - DNA, 25 bp, Artificial Sequence
  Synthetic Oligonucleotide
ccacgccggtagcaggtcgacgaac

SEQ ID NO: 6874 - DNA, 25 bp, Artificial Sequence
  Synthetic Oligonucleotide
ccacgccggtagcagttcgacgaac

SEQ ID NO: 6875 - DNA, 25 bp, Artificial Sequence
  Synthetic Oligonucleotide
ccacagcatctacagtctgaggtac

SEQ ID NO: 6876 - DNA, 25 bp, Artificial Sequence
  Synthetic Oligonucleotide
tcaaatctacgtagcggctaggaac

SEQ ID NO: 6877 - DNA, 25 bp, Artificial Sequence
  Synthetic Oligonucleotide
tacaacattagtggttcacaagccg

SEQ ID NO: 6878 - DNA, 25 bp, Artificial Sequence
  Synthetic Oligonucleotide
gaaacgaaagttagaaccgcagccc

SEQ ID NO: 6879 - DNA, 25 bp, Artificial Sequence
  Synthetic Oligonucleotide
aaacaaagttaggattgttgaccac

SEQ ID NO: 6880 - DNA, 25 bp, Artificial Sequence
  Synthetic Oligonucleotide
ccagaattagctctcgttgcacgac

SEQ ID NO: 6881 - DNA, 25 bp, Artificial Sequence
  Synthetic Oligonucleotide
ccgaagttgttctgcgtgagccgtc

SEQ ID NO: 6882 - DNA, 25 bp, Artificial Sequence
  Synthetic Oligonucleotide
aggtgacttcttcacgagaaccgac

SEQ ID NO: 6883 - DNA, 25 bp, Artificial Sequence
  Synthetic Oligonucleotide
gtcctgcgtctcgttaaagtaccac

SEQ ID NO: 6884 - DNA, 25 bp, Artificial Sequence
  Synthetic Oligonucleotide
tgacaccgatcgtgttacaaacaac

SEQ ID NO: 6885 - DNA, 25 bp, Artificial Sequence
  Synthetic Oligonucleotide
gcccactcgcacgagtatataagtc

SEQ ID NO: 6886 - DNA, 25 bp, Artificial Sequence
  Synthetic Oligonucleotide
accactactggagcggcagtccgtc

SEQ ID NO: 6887 - DNA, 25 bp, Artificial Sequence
  Synthetic Oligonucleotide
acccgagggaccaggacgtgtcgtc

SEQ ID NO: 6888 - DNA, 25 bp, Artificial Sequence
  Synthetic Oligonucleotide
actgctatcggagcaagcggtcgac

SEQ ID NO: 6889 - DNA, 25 bp, Artificial Sequence
  Synthetic Oligonucleotide
ccagcaacacgagacgtgcggtgac

SEQ ID NO: 6890 - DNA, 25 bp, Artificial Sequence
  Synthetic Oligonucleotide
cgaaagacggactcgtagacgggac

SEQ ID NO: 6891 - DNA, 25 bp, Artificial Sequence
  Synthetic Oligonucleotide
tcgaaagattatacgtacagttcac

SEQ ID NO: 6892 - DNA, 25 bp, Artificial Sequence
  Synthetic Oligonucleotide
aatgaatgttatcgtacaagctaac

SEQ ID NO: 6893 - DNA, 25 bp, Artificial Sequence
  Synthetic Oligonucleotide
taagaaccgttttcgaaagcgagac

SEQ ID NO: 6894 - DNA, 25 bp, Artificial Sequence
  Synthetic Oligonucleotide
cagaaacggcactcgttactggaac

SEQ ID NO: 6895 - DNA, 25 bp, Artificial Sequence
  Synthetic Oligonucleotide
agtataaccgggagcgataggaacg

SEQ ID NO: 6896 - DNA, 25 bp, Artificial Sequence
  Synthetic Oligonucleotide
agaagaaaggggggactaagacggt

SEQ ID NO: 6897 - DNA, 25 bp, Artificial Sequence
  Synthetic Oligonucleotide
cgaagatgaggcgcgcactaggctt

SEQ ID NO: 6898 - DNA, 25 bp, Artificial Sequence
  Synthetic Oligonucleotide
catattaaggaaagcctgtagctgt

SEQ ID NO: 6899 - DNA, 25 bp, Artificial Sequence
  Synthetic Oligonucleotide
catgttcaggaaagcctatagttac

SEQ ID NO: 6900 - DNA, 25 bp, Artificial Sequence
  Synthetic Oligonucleotide
atgtgtagtgtaattgcctaattac

SEQ ID NO: 6901 - DNA, 25 bp, Artificial Sequence
  Synthetic Oligonucleotide
cttgagagttggtggttacactaac

SEQ ID NO: 6902 - DNA, 25 bp, Artificial Sequence
  Synthetic Oligonucleotide
ctcgggaaggtgatacggtttcaac

SEQ ID NO: 6903 - DNA, 25 bp, Artificial Sequence
  Synthetic Oligonucleotide
gtttgggagttgatacggcttcaac

SEQ ID NO: 6904 - DNA, 25 bp, Artificial Sequence
  Synthetic Oligonucleotide
gtctgggagctaatatggtttcaac

SEQ ID NO: 6905 - DNA, 25 bp, Artificial Sequence
  Synthetic Oligonucleotide
ttcagggagttaataaggcttcaac

SEQ ID NO: 6906 - DNA, 25 bp, Artificial Sequence
  Synthetic Oligonucleotide
gaggttattatcagagcgtttaacc

SEQ ID NO: 6907 - DNA, 25 bp, Artificial Sequence
  Synthetic Oligonucleotide
gacctataacataaggcggttgcac

SEQ ID NO: 6908 - DNA, 25 bp, Artificial Sequence
  Synthetic Oligonucleotide
tctgtaacgactaaatcgggttaac

SEQ ID NO: 6909 - DNA, 25 bp, Artificial Sequence
  Synthetic Oligonucleotide
ccttaagctagagtgcggtgtcgac

SEQ ID NO: 6910 - DNA, 25 bp, Artificial Sequence
  Synthetic Oligonucleotide
aagcccttccgcaattgcagtgcct

SEQ ID NO: 6911 - DNA, 25 bp, Artificial Sequence
  Synthetic Oligonucleotide
gcgatggtccgtgcaatggatgcgc

SEQ ID NO: 6912 - DNA, 25 bp, Artificial Sequence
  Synthetic Oligonucleotide
ggcggtcgcaagatagactcggtac

SEQ ID NO: 6913 - DNA, 25 bp, Artificial Sequence
  Synthetic Oligonucleotide
aatgaacgccattaatcatcggtac

SEQ ID NO: 6914 - DNA, 25 bp, Artificial Sequence
  Synthetic Oligonucleotide
gaaagaatcaactaaacgccgagtc

SEQ ID NO: 6915 - DNA, 25 bp, Artificial Sequence
  Synthetic Oligonucleotide
aaaagaccaactgatcggccgcgac

SEQ ID NO: 6916 - DNA, 25 bp, Artificial Sequence
  Synthetic Oligonucleotide
tacgtaaagtactatcgtgcccgac

SEQ ID NO: 6917 - DNA, 25 bp, Artificial Sequence
  Synthetic Oligonucleotide
gttgatctagccccgtcgcctcgac

SEQ ID NO: 6918 - DNA, 25 bp, Artificial Sequence
  Synthetic Oligonucleotide
agcgagacagcgcgtccgacctcac

SEQ ID NO: 6919 - DNA, 25 bp, Artificial Sequence
  Synthetic Oligonucleotide
agtgagacatcttgtctgaccgaac

SEQ ID NO: 6920 - DNA, 25 bp, Artificial Sequence
  Synthetic Oligonucleotide
gagttaaagtctgaccttccgtcac

SEQ ID NO: 6921 - DNA, 25 bp, Artificial Sequence
  Synthetic Oligonucleotide
gacagactaaagctacccttttgac

SEQ ID NO: 6922 - DNA, 25 bp, Artificial Sequence
  Synthetic Oligonucleotide
cgacggaaacgcggaacattttcac

SEQ ID NO: 6923 - DNA, 25 bp, Artificial Sequence
  Synthetic Oligonucleotide
ccccagagcgagcaccttctaccac

SEQ ID NO: 6924 - DNA, 25 bp, Artificial Sequence
  Synthetic Oligonucleotide
ccctagagcgagcaccttctaccac

SEQ ID NO: 6925 - DNA, 25 bp, Artificial Sequence
  Synthetic Oligonucleotide
cgactaggtgtacacgaccttccac

SEQ ID NO: 6926 - DNA, 25 bp, Artificial Sequence
  Synthetic Oligonucleotide
gtaccggtgactggatagtatccac

SEQ ID NO: 6927 - DNA, 25 bp, Artificial Sequence
  Synthetic Oligonucleotide
acgttgcggctacgaacgttcacct

SEQ ID NO: 6928 - DNA, 25 bp, Artificial Sequence
  Synthetic Oligonucleotide
aaggtcctcgaacgtaaggctactc

SEQ ID NO: 6929 - DNA, 25 bp, Artificial Sequence
  Synthetic Oligonucleotide
tagattcccgtactgtctggacaat

SEQ ID NO: 6930 - DNA, 25 bp, Artificial Sequence
  Synthetic Oligonucleotide
gattgaggtaccagtctgtgatcac

SEQ ID NO: 6931 - DNA, 25 bp, Artificial Sequence
  Synthetic Oligonucleotide
tagttcgagatcctgtttgaacgac

SEQ ID NO: 6932 - DNA, 25 bp, Artificial Sequence
  Synthetic Oligonucleotide
agaagtgagaccattcatcaacgac

SEQ ID NO: 6933 - DNA, 25 bp, Artificial Sequence
  Synthetic Oligonucleotide
ttactcgaactgattcaacagtaac

SEQ ID NO: 6934 - DNA, 25 bp, Artificial Sequence
  Synthetic Oligonucleotide
atatacgtgaagaggtctaacattc

SEQ ID NO: 6935 - DNA, 25 bp, Artificial Sequence
  Synthetic Oligonucleotide
gacattcataaaaggacacacaaac

SEQ ID NO: 6936 - DNA, 25 bp, Artificial Sequence
  Synthetic Oligonucleotide
ggaaactcaaagatggaacgccagc

SEQ ID NO: 6937 - DNA, 25 bp, Artificial Sequence
  Synthetic Oligonucleotide
gaccgaagtgggttaagtccgtatc

SEQ ID NO: 6938 - DNA, 25 bp, Artificial Sequence
  Synthetic Oligonucleotide
gaggtaatgaactaactcctactac

SEQ ID NO: 6939 - DNA, 25 bp, Artificial Sequence
  Synthetic Oligonucleotide
agagggaccgaatgtattcggtaac

SEQ ID NO: 6940 - DNA, 25 bp, Artificial Sequence
  Synthetic Oligonucleotide
aggcggtccgaattggaccgttacg

SEQ ID NO: 6941 - DNA, 25 bp, Artificial Sequence
  Synthetic Oligonucleotide
cagcagttctacgatggcaagtcct

SEQ ID NO: 6942 - DNA, 25 bp, Artificial Sequence
  Synthetic Oligonucleotide
aggacttgccatcgtagaactgctg

SEQ ID NO: 6943 - DNA, 25 bp, Artificial Sequence
  Synthetic Oligonucleotide
ttctcgaggtactgctgcgccggcc

SEQ ID NO: 6944 - DNA, 25 bp, Artificial Sequence
  Synthetic Oligonucleotide
gaggaagacgtaggacagtcgctac

SEQ ID NO: 6945 - DNA, 25 bp, Artificial Sequence
  Synthetic Oligonucleotide
actgagggtaggaaacagacgttac

SEQ ID NO: 6946 - DNA, 25 bp, Artificial Sequence
  Synthetic Oligonucleotide
tctggtctgttggtatcgaggtaac

SEQ ID NO: 6947 - DNA, 25 bp, Artificial Sequence
  Synthetic Oligonucleotide
gcttgagtcgttaaagttcaagttc

SEQ ID NO: 6948 - DNA, 25 bp, Artificial Sequence
  Synthetic Oligonucleotide
gagtcgtatgttaagaaccgggttc

SEQ ID NO: 6949 - DNA, 25 bp, Artificial Sequence
  Synthetic Oligonucleotide
taacggttgtcgaaaactggtgatc

SEQ ID NO: 6950 - DNA, 25 bp, Artificial Sequence
  Synthetic Oligonucleotide
caaaactgtcggaaagttagggatc

SEQ ID NO: 6951 - DNA, 25 bp, Artificial Sequence
  Synthetic Oligonucleotide
agaactactgggaaagttgctgtcc

SEQ ID NO: 6952 - DNA, 25 bp, Artificial Sequence
  Synthetic Oligonucleotide
tcaactggtcgactcgttgctgcac

SEQ ID NO: 6953 - DNA, 25 bp, Artificial Sequence
  Synthetic Oligonucleotide
ccaccatggtggtctgttgtgacac

SEQ ID NO: 6954 - DNA, 25 bp, Artificial Sequence
  Synthetic Oligonucleotide
tctaagtcgtggaacctatgtttac

SEQ ID NO: 6955 - DNA, 25 bp, Artificial Sequence
  Synthetic Oligonucleotide
gaagtcttcagtgctgtgtgtctac

SEQ ID NO: 6956 - DNA, 25 bp, Artificial Sequence
  Synthetic Oligonucleotide
gaatacttgagttctgaacgtatac

SEQ ID NO: 6957 - DNA, 25 bp, Artificial Sequence
  Synthetic Oligonucleotide
ttaaagtagtatcctgcgtgggaac

SEQ ID NO: 6958 - DNA, 25 bp, Artificial Sequence
  Synthetic Oligonucleotide
tacacgtccggtctgtggggcaagt

SEQ ID NO: 6959 - DNA, 25 bp, Artificial Sequence
  Synthetic Oligonucleotide
tcactaccagaaaggccactcacag

SEQ ID NO: 6960 - DNA, 25 bp, Artificial Sequence
  Synthetic Oligonucleotide
aggacacctaaaagtgcccggcagt

SEQ ID NO: 6961 - DNA, 25 bp, Artificial Sequence
  Synthetic Oligonucleotide
gaggttgacaaaaggccgcttctag

SEQ ID NO: 6962 - DNA, 25 bp, Artificial Sequence
  Synthetic Oligonucleotide
aaggttaacgaaaggccgtttctat

SEQ ID NO: 6963 - DNA, 25 bp, Artificial Sequence
  Synthetic Oligonucleotide
aggctgcaagtccgacgatttctac

SEQ ID NO: 6964 - DNA, 25 bp, Artificial Sequence
  Synthetic Oligonucleotide
tggctacggaaagtcgcttgcgtac

SEQ ID NO: 6965 - DNA, 25 bp, Artificial Sequence
  Synthetic Oligonucleotide
gtttgtcttaggtaaatttctgctc

SEQ ID NO: 6966 - DNA, 25 bp, Artificial Sequence
  Synthetic Oligonucleotide
tagttagttcggtttaaatcttgcc

SEQ ID NO: 6967 - DNA, 25 bp, Artificial Sequence
  Synthetic Oligonucleotide
gtgtatctgtcgtcatacattttcc

SEQ ID NO: 6968 - DNA, 25 bp, Artificial Sequence
  Synthetic Oligonucleotide
gtgtgcgtcgagtaacatcttccac

SEQ ID NO: 6969 - DNA, 25 bp, Artificial Sequence
  Synthetic Oligonucleotide
gtgtgcgtcgagtaacatctttcac

SEQ ID NO: 6970 - DNA, 25 bp, Artificial Sequence
  Synthetic Oligonucleotide
tcgtcgtctgcgagcatccgtagcc

SEQ ID NO: 6971 - DNA, 25 bp, Artificial Sequence
  Synthetic Oligonucleotide
gtcgttgcgattttagctagtcgac

SEQ ID NO: 6972 - DNA, 25 bp, Artificial Sequence
  Synthetic Oligonucleotide
gtcgactagctaaaatcgcaacgac

SEQ ID NO: 6973 - DNA, 25 bp, Artificial Sequence
  Synthetic Oligonucleotide
agtcgaccagttgaaatcgcaagtc

SEQ ID NO: 6974 - DNA, 25 bp, Artificial Sequence
  Synthetic Oligonucleotide
aagtgccgggtagaggaccaacgtc

SEQ ID NO: 6975 - DNA, 25 bp, Artificial Sequence
  Synthetic Oligonucleotide
acaggaccaaacgatgtaccccgtc

SEQ ID NO: 6976 - DNA, 25 bp, Artificial Sequence
  Synthetic Oligonucleotide
aaggacttaaagtactcctcaagac

SEQ ID NO: 6977 - DNA, 25 bp, Artificial Sequence
  Synthetic Oligonucleotide
gagacctggaagccttctcgtcagc

SEQ ID NO: 6978 - DNA, 25 bp, Artificial Sequence
  Synthetic Oligonucleotide
ggacctccgtaatttccctatacgc

SEQ ID NO: 6979 - DNA, 25 bp, Artificial Sequence
  Synthetic Oligonucleotide
ggtaacttcgactttaccccatacc

SEQ ID NO: 6980 - DNA, 25 bp, Artificial Sequence
  Synthetic Oligonucleotide
gcgtaatgtctatttgtcacccttc

SEQ ID NO: 6981 - DNA, 25 bp, Artificial Sequence
  Synthetic Oligonucleotide
cggcaacttaaacggcactcacctc

SEQ ID NO: 6982 - DNA, 25 bp, Artificial Sequence
  Synthetic Oligonucleotide
ggcaaccgttaaccattctcacttc

SEQ ID NO: 6983 - DNA, 25 bp, Artificial Sequence
  Synthetic Oligonucleotide
gtcttcatgttctgtttccgcttac

SEQ ID NO: 6984 - DNA, 25 bp, Artificial Sequence
  Synthetic Oligonucleotide
ggggctttctatctttcccatctac

SEQ ID NO: 6985 - DNA, 25 bp, Artificial Sequence
  Synthetic Oligonucleotide
ggccatgtctagtccttcccacttt

SEQ ID NO: 6986 - DNA, 25 bp, Artificial Sequence
  Synthetic Oligonucleotide
ccgctgatggtagctttcaactatc

SEQ ID NO: 6987 - DNA, 25 bp, Artificial Sequence
  Synthetic Oligonucleotide
aaccaaagggccttcgctgactctc

SEQ ID NO: 6988 - DNA, 25 bp, Artificial Sequence
  Synthetic Oligonucleotide
atcgagaagaggtccctcctgctcc

SEQ ID NO: 6989 - DNA, 25 bp, Artificial Sequence
  Synthetic Oligonucleotide
gacagcgggtccgacctcacgtcac

SEQ ID NO: 6990 - DNA, 25 bp, Artificial Sequence
  Synthetic Oligonucleotide
cgccgacgggctggtttacggcgac

SEQ ID NO: 6991 - DNA, 25 bp, Artificial Sequence
  Synthetic Oligonucleotide
acatcacaaccttgttatggactac

SEQ ID NO: 6992 - DNA, 25 bp, Artificial Sequence
  Synthetic Oligonucleotide
gaactaccacagtcgtttgagatac

SEQ ID NO: 6993 - DNA, 25 bp, Artificial Sequence
  Synthetic Oligonucleotide
taactaccgctgttacaggtgaaac

SEQ ID NO: 6994 - DNA, 25 bp, Artificial Sequence
  Synthetic Oligonucleotide
aggactcctcttcagcgtcgacaac

SEQ ID NO: 6995 - DNA, 25 bp, Artificial Sequence
  Synthetic Oligonucleotide
agagtaataacgatctgcgttaaac

SEQ ID NO: 6996 - DNA, 25 bp, Artificial Sequence
  Synthetic Oligonucleotide
ggtagctaattcatcccgtctaacc

SEQ ID NO: 6997 - DNA, 25 bp, Artificial Sequence
  Synthetic Oligonucleotide
gaagtgagaatggttaacggttgcc

SEQ ID NO: 6998 - DNA, 25 bp, Artificial Sequence
  Synthetic Oligonucleotide
gaagggaaacgaaacgtggtcattc

SEQ ID NO: 6999 - DNA, 25 bp, Artificial Sequence
  Synthetic Oligonucleotide
gacaagctaaagtagaccgccattt

SEQ ID NO: 7000 - DNA, 25 bp, Artificial Sequence
  Synthetic Oligonucleotide
caaggacacaatgggttagacgttt

SEQ ID NO: 7001 - DNA, 25 bp, Artificial Sequence
  Synthetic Oligonucleotide
cgatcgtaaactctgttatagttat

SEQ ID NO: 7002 - DNA, 25 bp, Artificial Sequence
  Synthetic Oligonucleotide
acaaataatctgctgctgtaggtat

SEQ ID NO: 7003 - DNA, 25 bp, Artificial Sequence
  Synthetic Oligonucleotide
ctgtaatgatcgtttgctaatcgat

SEQ ID NO: 7004 - DNA, 25 bp, Artificial Sequence
  Synthetic Oligonucleotide
taacggctgcatgactatctgtcac

SEQ ID NO: 7005 - DNA, 25 bp, Artificial Sequence
  Synthetic Oligonucleotide
ctcagacttgcagtcttctgtcgac

SEQ ID NO: 7006 - DNA, 25 bp, Artificial Sequence
  Synthetic Oligonucleotide
cctacacttccttgtctcatcgtcc

SEQ ID NO: 7007 - DNA, 25 bp, Artificial Sequence
  Synthetic Oligonucleotide
actcctacagcttcttgtggaaccc

SEQ ID NO: 7008 - DNA, 25 bp, Artificial Sequence
  Synthetic Oligonucleotide
acacgtgcgtgctttgtgagcctac

SEQ ID NO: 7009 - DNA, 25 bp, Artificial Sequence
  Synthetic Oligonucleotide
ggcatggtcgacttttgaactacac

SEQ ID NO: 7010 - DNA, 25 bp, Artificial Sequence
  Synthetic Oligonucleotide
ggaccaacgtctgtgatgaacaacg

SEQ ID NO: 7011 - DNA, 25 bp, Artificial Sequence
  Synthetic Oligonucleotide
ctaaagagtcggagagtcggacatg

SEQ ID NO: 7012 - DNA, 25 bp, Artificial Sequence
  Synthetic Oligonucleotide
ctattcggcgtgtaggcggttaacg

SEQ ID NO: 7013 - DNA, 25 bp, Artificial Sequence
  Synthetic Oligonucleotide
tttacggctactagagagagttcac

SEQ ID NO: 7014 - DNA, 25 bp, Artificial Sequence
  Synthetic Oligonucleotide
ctagtgcgacgaggtacagcggcac

SEQ ID NO: 7015 - DNA, 25 bp, Artificial Sequence
  Synthetic Oligonucleotide
tgaggacgaacgactaggtgtagac

SEQ ID NO: 7016 - DNA, 25 bp, Artificial Sequence
  Synthetic Oligonucleotide
cagtggtacaaaactggttacgacg

SEQ ID NO: 7017 - DNA, 25 bp, Artificial Sequence
  Synthetic Oligonucleotide
agcatggctatgaactcgtgcggag

SEQ ID NO: 7018 - DNA, 25 bp, Artificial Sequence
  Synthetic Oligonucleotide
tcctaacccattaaacgcgcggacg

SEQ ID NO: 7019 - DNA, 25 bp, Artificial Sequence
  Synthetic Oligonucleotide
ctagcgccactcgaactggacgtac

SEQ ID NO: 7020 - DNA, 25 bp, Artificial Sequence
  Synthetic Oligonucleotide
ctgtcgcggagtcggcgtaggactc

SEQ ID NO: 7021 - DNA, 25 bp, Artificial Sequence
  Synthetic Oligonucleotide
atgtgttcgtcgttggtaggtactc

SEQ ID NO: 7022 - DNA, 25 bp, Artificial Sequence
  Synthetic Oligonucleotide
tacttgactcgtctccgtagtcacc

SEQ ID NO: 7023 - DNA, 25 bp, Artificial Sequence
  Synthetic Oligonucleotide
gtagtagtacctctaccacgacaac

SEQ ID NO: 7024 - DNA, 25 bp, Artificial Sequence
  Synthetic Oligonucleotide
ggactgttactaagacaacacctac

SEQ ID NO: 7025 - DNA, 25 bp, Artificial Sequence
  Synthetic Oligonucleotide
gtgtgtatctagtgactaaacttac

SEQ ID NO: 7026 - DNA, 25 bp, Artificial Sequence
  Synthetic Oligonucleotide
tatgttttcgtgatgggatctcgac

SEQ ID NO: 7027 - DNA, 25 bp, Artificial Sequence
  Synthetic Oligonucleotide
ttgcttcggtgttggtgctaagtac

SEQ ID NO: 7028 - DNA, 25 bp, Artificial Sequence
  Synthetic Oligonucleotide
ttcgattagagtccagggtataatc

SEQ ID NO: 7029 - DNA, 25 bp, Artificial Sequence
  Synthetic Oligonucleotide
cgattacatcgctgaagtctagttc

SEQ ID NO: 7030 - DNA, 25 bp, Artificial Sequence
  Synthetic Oligonucleotide
ggaggtaatatctacctaccgtatc

SEQ ID NO: 7031 - DNA, 25 bp, Artificial Sequence
  Synthetic Oligonucleotide
gtgacttatgtatcatctttgtatc

SEQ ID NO: 7032 - DNA, 25 bp, Artificial Sequence
  Synthetic Oligonucleotide
cgaattagaaactctgttcgtatac

SEQ ID NO: 7033 - DNA, 25 bp, Artificial Sequence
  Synthetic Oligonucleotide
gattaacgaaaggactgacgtaaac

SEQ ID NO: 7034 - DNA, 25 bp, Artificial Sequence
  Synthetic Oligonucleotide
gatcttcgtaaacgccacgtgctac

SEQ ID NO: 7035 - DNA, 25 bp, Artificial Sequence
  Synthetic Oligonucleotide
gatcttcgtgaacgccacgtgctac

SEQ ID NO: 7036 - DNA, 25 bp, Artificial Sequence
  Synthetic Oligonucleotide
ctacgttgcggctaggaacgttcac

SEQ ID NO: 7037 - DNA, 25 bp, Artificial Sequence
  Synthetic Oligonucleotide
ctgttcgccggttaggaacctgtac

SEQ ID NO: 7038 - DNA, 25 bp, Artificial Sequence
  Synthetic Oligonucleotide
tggtcgacttttgaactacacttac

SEQ ID NO: 7039 - DNA, 25 bp, Artificial Sequence
  Synthetic Oligonucleotide
gaacgactaggtgtagacgaccttc

SEQ ID NO: 7040 - DNA, 25 bp, Artificial Sequence
  Synthetic Oligonucleotide
caacactcggtggtacaccaacgac

SEQ ID NO: 7041 - DNA, 25 bp, Artificial Sequence
  Synthetic Oligonucleotide
cggaaccgtcgaggtcaccttcgac

SEQ ID NO: 7042 - DNA, 25 bp, Artificial Sequence
  Synthetic Oligonucleotide
gtcggaaccgtcgcggtcatctccg

SEQ ID NO: 7043 - DNA, 25 bp, Artificial Sequence
  Synthetic Oligonucleotide
tgtgaacaccacttgctatctacct

SEQ ID NO: 7044 - DNA, 25 bp, Artificial Sequence
  Synthetic Oligonucleotide
tcgtggaacctatgtttacttatac

SEQ ID NO: 7045 - DNA, 25 bp, Artificial Sequence
  Synthetic Oligonucleotide
tttgtgaacaccacttgctatctac

SEQ ID NO: 7046 - DNA, 25 bp, Artificial Sequence
  Synthetic Oligonucleotide
tcagagtatccgaaacttggttcac

SEQ ID NO: 7047 - DNA, 25 bp, Artificial Sequence
  Synthetic Oligonucleotide
gagaactccctacctgctcgttcac

SEQ ID NO: 7048 - DNA, 25 bp, Artificial Sequence
  Synthetic Oligonucleotide
gaagtaccttctacctcggtttcgc

SEQ ID NO: 7049 - DNA, 25 bp, Artificial Sequence
  Synthetic Oligonucleotide
gagtatctttagacacctgtatttc

SEQ ID NO: 7050 - DNA, 25 bp, Artificial Sequence
  Synthetic Oligonucleotide
acctctatgtatcccgctgtccttc

SEQ ID NO: 7051 - DNA, 25 bp, Artificial Sequence
  Synthetic Oligonucleotide
cgttactagaactggaagtaccttc

SEQ ID NO: 7052 - DNA, 25 bp, Artificial Sequence
  Synthetic Oligonucleotide
actctacctacgaggccgtagcttc

SEQ ID NO: 7053 - DNA, 25 bp, Artificial Sequence
  Synthetic Oligonucleotide
aaacccttacgcaggtccgtgaacc

SEQ ID NO: 7054 - DNA, 25 bp, Artificial Sequence
  Synthetic Oligonucleotide
tcacaggtgccgagagtcgggaacc

SEQ ID NO: 7055 - DNA, 25 bp, Artificial Sequence
  Synthetic Oligonucleotide
catcagggtctgtggtccggacccg

SEQ ID NO: 7056 - DNA, 25 bp, Artificial Sequence
  Synthetic Oligonucleotide
attcggcgtccgaggtgaggaccac

SEQ ID NO: 7057 - DNA, 25 bp, Artificial Sequence
  Synthetic Oligonucleotide
atttggtgtacgaggtggcgaacac

SEQ ID NO: 7058 - DNA, 25 bp, Artificial Sequence
  Synthetic Oligonucleotide
atttggtgtacgaggtggcgaacac

SEQ ID NO: 7059 - DNA, 25 bp, Artificial Sequence
  Synthetic Oligonucleotide
atttggtgtacgaggtggcgaacac

SEQ ID NO: 7060 - DNA, 25 bp, Artificial Sequence
  Synthetic Oligonucleotide
aatattgggacgagttcgcccgacc

SEQ ID NO: 7061 - DNA, 25 bp, Artificial Sequence
  Synthetic Oligonucleotide
gaaacttgtgacttgatgacacccc

SEQ ID NO: 7062 - DNA, 25 bp, Artificial Sequence
  Synthetic Oligonucleotide
catggtcgacttttgaactacactt

SEQ ID NO: 7063 - DNA, 25 bp, Artificial Sequence
  Synthetic Oligonucleotide
ccaagagtagctacttgacccacag

SEQ ID NO: 7064 - DNA, 25 bp, Artificial Sequence
  Synthetic Oligonucleotide
cgaaagtagctggttgtccggcgac

SEQ ID NO: 7065 - DNA, 25 bp, Artificial Sequence
  Synthetic Oligonucleotide
actgacacggcaccttaaacggcac

SEQ ID NO: 7066 - DNA, 25 bp, Artificial Sequence
  Synthetic Oligonucleotide
aggacttgccatcgtagaactgctg

SEQ ID NO: 7067 - DNA, 25 bp, Artificial Sequence
  Synthetic Oligonucleotide
cagcagttctacgatggcaagtcct

SEQ ID NO: 7068 - DNA, 25 bp, Artificial Sequence
  Synthetic Oligonucleotide
ttctcgaggtacagctgcgccggcc

SEQ ID NO: 7069 - DNA, 25 bp, Artificial Sequence
  Synthetic Oligonucleotide
gaggaagacgtacgacagtcgctac

SEQ ID NO: 7070 - DNA, 25 bp, Artificial Sequence
  Synthetic Oligonucleotide
actgagggtaggtaacagacgttac

SEQ ID NO: 7071 - DNA, 25 bp, Artificial Sequence
  Synthetic Oligonucleotide
tctggtctgttgctatcgaggtaac

SEQ ID NO: 7072 - DNA, 25 bp, Artificial Sequence
  Synthetic Oligonucleotide
gcttgagtcgtttaagttcaagttc

SEQ ID NO: 7073 - DNA, 25 bp, Artificial Sequence
  Synthetic Oligonucleotide
gagtcgtatgtttagaaccgggttc

SEQ ID NO: 7074 - DNA, 25 bp, Artificial Sequence
  Synthetic Oligonucleotide
taacggttgtcgtaaactggtgatc

SEQ ID NO: 7075 - DNA, 25 bp, Artificial Sequence
  Synthetic Oligonucleotide
caaaactgtcggtaagttagggatc

SEQ ID NO: 7076 - DNA, 25 bp, Artificial Sequence
  Synthetic Oligonucleotide
agaactactgggtaagttgctgtcc

SEQ ID NO: 7077 - DNA, 25 bp, Artificial Sequence
  Synthetic Oligonucleotide
tcaactggtcgagtcgttgctgcac

SEQ ID NO: 7078 - DNA, 25 bp, Artificial Sequence
  Synthetic Oligonucleotide
ccaccatggtggactgttgtgacac

SEQ ID NO: 7079 - DNA, 25 bp, Artificial Sequence
  Synthetic Oligonucleotide
tctaagtcgtggtacctatgtttac

SEQ ID NO: 7080 - DNA, 25 bp, Artificial Sequence
  Synthetic Oligonucleotide
gaagtcttcagtcctgtgtgtctac

SEQ ID NO: 7081 - DNA, 25 bp, Artificial Sequence
  Synthetic Oligonucleotide
gaatacttgagtactgaacgtatac

SEQ ID NO: 7082 - DNA, 25 bp, Artificial Sequence
  Synthetic Oligonucleotide
ttaaagtagtatgctgcgtgggaac

SEQ ID NO: 7083 - DNA, 25 bp, Artificial Sequence
  Synthetic Oligonucleotide
tacacgtccggtgtgtggggcaagt

SEQ ID NO: 7084 - DNA, 25 bp, Artificial Sequence
  Synthetic Oligonucleotide
tcactaccagaatggccactcacag

SEQ ID NO: 7085 - DNA, 25 bp, Artificial Sequence
  Synthetic Oligonucleotide
aggacacctaaatgtgcccggcagt

SEQ ID NO: 7086 - DNA, 25 bp, Artificial Sequence
  Synthetic Oligonucleotide
gaggttgacaaatggccgcttctag

SEQ ID NO: 7087 - DNA, 25 bp, Artificial Sequence
  Synthetic Oligonucleotide
aaggttaacgaatggccgtttctat

SEQ ID NO: 7088 - DNA, 25 bp, Artificial Sequence
  Synthetic Oligonucleotide
aggctgcaagtcggacgatttctac

SEQ ID NO: 7089 - DNA, 25 bp, Artificial Sequence
  Synthetic Oligonucleotide
tggctacggaaactcgcttgcgtac

SEQ ID NO: 7090 - DNA, 25 bp, Artificial Sequence
  Synthetic Oligonucleotide
gtttgtcttaggaaaatttctgctc

SEQ ID NO: 7091 - DNA, 25 bp, Artificial Sequence
  Synthetic Oligonucleotide
tagttagttcggattaaatcttgcc

SEQ ID NO: 7092 - DNA, 25 bp, Artificial Sequence
  Synthetic Oligonucleotide
gtgtatctgtcgacatacattttcc

SEQ ID NO: 7093 - DNA, 25 bp, Artificial Sequence
  Synthetic Oligonucleotide
gtgtgcgtcgagaaacatcttccac

SEQ ID NO: 7094 - DNA, 25 bp, Artificial Sequence
  Synthetic Oligonucleotide
gtgtgcgtcgagaaacatctttcac

SEQ ID NO: 7095 - DNA, 25 bp, Artificial Sequence
  Synthetic Oligonucleotide
tcgtcgtctgcgtgcatccgtagcc

SEQ ID NO: 7096 - DNA, 25 bp, Artificial Sequence
  Synthetic Oligonucleotide
gtcgttgcgattatagctagtcgac

SEQ ID NO: 7097 - DNA, 25 bp, Artificial Sequence
  Synthetic Oligonucleotide
gtcgactagctataatcgcaacgac

SEQ ID NO: 7098 - DNA, 25 bp, Artificial Sequence
  Synthetic Oligonucleotide
agtcgaccagttcaaatcgcaagtc

SEQ ID NO: 7099 - DNA, 25 bp, Artificial Sequence
  Synthetic Oligonucleotide
aagtgccgggtacaggaccaacgtc

SEQ ID NO: 7100 - DNA, 25 bp, Artificial Sequence
  Synthetic Oligonucleotide
acaggaccaaaccatgtaccccgtc

SEQ ID NO: 7101 - DNA, 25 bp, Artificial Sequence
  Synthetic Oligonucleotide
aaggacttaaagaactcctcaagac

SEQ ID NO: 7102 - DNA, 25 bp, Artificial Sequence
  Synthetic Oligonucleotide
gagacctggaaggcttctcgtcagc

SEQ ID NO: 7103 - DNA, 25 bp, Artificial Sequence
  Synthetic Oligonucleotide
ggacctccgtaaattccctatacgc

SEQ ID NO: 7104 - DNA, 25 bp, Artificial Sequence
  Synthetic Oligonucleotide
ggtaacttcgacattaccccatacc

SEQ ID NO: 7105 - DNA, 25 bp, Artificial Sequence
  Synthetic Oligonucleotide
gcgtaatgtctaattgtcacccttc

SEQ ID NO: 7106 - DNA, 25 bp, Artificial Sequence
  Synthetic Oligonucleotide
cggcaacttaaagggcactcacctc

SEQ ID NO: 7107 - DNA, 25 bp, Artificial Sequence
  Synthetic Oligonucleotide
ggcaaccgttaagcattctcacttc

SEQ ID NO: 7108 - DNA, 25 bp, Artificial Sequence
  Synthetic Oligonucleotide
gtcttcatgttcagtttccgcttac

SEQ ID NO: 7109 - DNA, 25 bp, Artificial Sequence
  Synthetic Oligonucleotide
ggggctttctatgtttcccatctac

SEQ ID NO: 7110 - DNA, 25 bp, Artificial Sequence
  Synthetic Oligonucleotide
ggccatgtctagaccttcccacttt

SEQ ID NO: 7111 - DNA, 25 bp, Artificial Sequence
  Synthetic Oligonucleotide
ccgctgatggtacctttcaactatc

SEQ ID NO: 7112 - DNA, 25 bp, Artificial Sequence
  Synthetic Oligonucleotide
aaccaaagggccatcgctgactctc

SEQ ID NO: 7113 - DNA, 25 bp, Artificial Sequence
  Synthetic Oligonucleotide
atcgagaagaggaccctcctgctcc

SEQ ID NO: 7114 - DNA, 25 bp, Artificial Sequence
  Synthetic Oligonucleotide
gacagcgggtcccacctcacgtcac

SEQ ID NO: 7115 - DNA, 25 bp, Artificial Sequence
  Synthetic Oligonucleotide
cgccgacgggctcgtttacggcgac

SEQ ID NO: 7116 - DNA, 25 bp, Artificial Sequence
  Synthetic Oligonucleotide
acatcacaacctagttatggactac

SEQ ID NO: 7117 - DNA, 25 bp, Artificial Sequence
  Synthetic Oligonucleotide
gaactaccacagacgtttgagatac

SEQ ID NO: 7118 - DNA, 25 bp, Artificial Sequence
  Synthetic Oligonucleotide
taactaccgctgatacaggtgaaac

SEQ ID NO: 7119 - DNA, 25 bp, Artificial Sequence
  Synthetic Oligonucleotide
aggactcctcttgagcgtcgacaac

SEQ ID NO: 7120 - DNA, 25 bp, Artificial Sequence
  Synthetic Oligonucleotide
agagtaataacgttctgcgttaaac

SEQ ID NO: 7121 - DNA, 25 bp, Artificial Sequence
  Synthetic Oligonucleotide
ggtagctaattcttcccgtctaacc

SEQ ID NO: 7122 - DNA, 25 bp, Artificial Sequence
  Synthetic Oligonucleotide
gaagtgagaatgcttaacggttgcc

SEQ ID NO: 7123 - DNA, 25 bp, Artificial Sequence
  Synthetic Oligonucleotide
gaagggaaacgatacgtggtcattc

SEQ ID NO: 7124 - DNA, 25 bp, Artificial Sequence
  Synthetic Oligonucleotide
gacaagctaaagaagaccgccattt

SEQ ID NO: 7125 - DNA, 25 bp, Artificial Sequence
  Synthetic Oligonucleotide
caaggacacaatcggttagacgttt

SEQ ID NO: 7126 - DNA, 25 bp, Artificial Sequence
  Synthetic Oligonucleotide
cgatcgtaaactgtgttatagttat

SEQ ID NO: 7127 - DNA, 25 bp, Artificial Sequence
  Synthetic Oligonucleotide
acaaataatctggtgctgtaggtat

SEQ ID NO: 7128 - DNA, 25 bp, Artificial Sequence
  Synthetic Oligonucleotide
ctgtaatgatcgattgctaatcgat

SEQ ID NO: 7129 - DNA, 25 bp, Artificial Sequence
  Synthetic Oligonucleotide
cagcagttctacgatggcaagtcct

SEQ ID NO: 7130 - DNA, 25 bp, Artificial Sequence
  Synthetic Oligonucleotide
taacggctgcatcactatctgtcac

SEQ ID NO: 7131 - DNA, 25 bp, Artificial Sequence
  Synthetic Oligonucleotide
ctcagacttgcactcttctgtcgac

SEQ ID NO: 7132 - DNA, 25 bp, Artificial Sequence
  Synthetic Oligonucleotide
cctacacttcctagtctcatcgtcc

SEQ ID NO: 7133 - DNA, 25 bp, Artificial Sequence
  Synthetic Oligonucleotide
actcctacagctacttgtggaaccc

SEQ ID NO: 7134 - DNA, 25 bp, Artificial Sequence
  Synthetic Oligonucleotide
acacgtgcgtgcattgtgagcctac

SEQ ID NO: 7135 - DNA, 25 bp, Artificial Sequence
  Synthetic Oligonucleotide
ggcatggtcgacatttgaactacac

SEQ ID NO: 7136 - DNA, 25 bp, Artificial Sequence
  Synthetic Oligonucleotide
ggaccaacgtctctgatgaacaacg

SEQ ID NO: 7137 - DNA, 25 bp, Artificial Sequence
  Synthetic Oligonucleotide
ctaaagagtcggtgagtcggacatg

SEQ ID NO: 7138 - DNA, 25 bp, Artificial Sequence
  Synthetic Oligonucleotide
ctattcggcgtgaaggcggttaacg

SEQ ID NO: 7139 - DNA, 25 bp, Artificial Sequence
  Synthetic Oligonucleotide
tttacggctacttgagagagttcac

SEQ ID NO: 7140 - DNA, 25 bp, Artificial Sequence
  Synthetic Oligonucleotide
ctagtgcgacgacgtacagcggcac

SEQ ID NO: 7141 - DNA, 25 bp, Artificial Sequence
  Synthetic Oligonucleotide
tgaggacgaacgtctaggtgtagac

SEQ ID NO: 7142 - DNA, 25 bp, Artificial Sequence
  Synthetic Oligonucleotide
cagtggtacaaatctggttacgacg

SEQ ID NO: 7143 - DNA, 25 bp, Artificial Sequence
  Synthetic Oligonucleotide
agcatggctatgtactcgtgcggag

SEQ ID NO: 7144 - DNA, 25 bp, Artificial Sequence
  Synthetic Oligonucleotide
tcctaacccatttaacgcgcggacg

SEQ ID NO: 7145 - DNA, 25 bp, Artificial Sequence
  Synthetic Oligonucleotide
ctagcgccactccaactggacgtac

SEQ ID NO: 7146 - DNA, 25 bp, Artificial Sequence
  Synthetic Oligonucleotide
ctgtcgcggagtgggcgtaggactc

SEQ ID NO: 7147 - DNA, 25 bp, Artificial Sequence
  Synthetic Oligonucleotide
atgtgttcgtcgatggtaggtactc

SEQ ID NO: 7148 - DNA, 25 bp, Artificial Sequence
  Synthetic Oligonucleotide
tacttgactcgtgtccgtagtcacc

SEQ ID NO: 7149 - DNA, 25 bp, Artificial Sequence
  Synthetic Oligonucleotide
gtagtagtacctgtaccacgacaac

SEQ ID NO: 7150 - DNA, 25 bp, Artificial Sequence
  Synthetic Oligonucleotide
ggactgttactatgacaacacctac

SEQ ID NO: 7151 - DNA, 25 bp, Artificial Sequence
  Synthetic Oligonucleotide
gtgtgtatctagagactaaacttac

SEQ ID NO: 7152 - DNA, 25 bp, Artificial Sequence
  Synthetic Oligonucleotide
tatgttttcgtgttgggatctcgac

SEQ ID NO: 7153 - DNA, 25 bp, Artificial Sequence
  Synthetic Oligonucleotide
ttgcttcggtgtaggtgctaagtac

SEQ ID NO: 7154 - DNA, 25 bp, Artificial Sequence
  Synthetic Oligonucleotide
ttcgattagagtgcagggtataatc

SEQ ID NO: 7155 - DNA, 25 bp, Artificial Sequence
  Synthetic Oligonucleotide
cgattacatcgcagaagtctagttc

SEQ ID NO: 7156 - DNA, 25 bp, Artificial Sequence
  Synthetic Oligonucleotide
ggaggtaatatcaacctaccgtatc

SEQ ID NO: 7157 - DNA, 25 bp, Artificial Sequence
  Synthetic Oligonucleotide
gtgacttatgtaacatctttgtatc

SEQ ID NO: 7158 - DNA, 25 bp, Artificial Sequence
  Synthetic Oligonucleotide
cgaattagaaacactgttcgtatac

SEQ ID NO: 7159 - DNA, 25 bp, Artificial Sequence
  Synthetic Oligonucleotide
gattaacgaaagcactgacgtaaac

SEQ ID NO: 7160 - DNA, 25 bp, Artificial Sequence
  Synthetic Oligonucleotide
gatcttcgtaaaggccacgtgctac

SEQ ID NO: 7161 - DNA, 25 bp, Artificial Sequence
  Synthetic Oligonucleotide
gatcttcgtgaaggccacgtgctac

SEQ ID NO: 7162 - DNA, 25 bp, Artificial Sequence
  Synthetic Oligonucleotide
ctacgttgcggcaaggaacgttcac

SEQ ID NO: 7163 - DNA, 25 bp, Artificial Sequence
  Synthetic Oligonucleotide
ctgttcgccggtaaggaacctgtac

SEQ ID NO: 7164 - DNA, 25 bp, Artificial Sequence
  Synthetic Oligonucleotide
tggtcgacttttcaactacacttac

SEQ ID NO: 7165 - DNA, 25 bp, Artificial Sequence
  Synthetic Oligonucleotide
gaacgactaggtctagacgaccttc

SEQ ID NO: 7166 - DNA, 25 bp, Artificial Sequence
  Synthetic Oligonucleotide
caacactcggtgctacaccaacgac

SEQ ID NO: 7167 - DNA, 25 bp, Artificial Sequence
  Synthetic Oligonucleotide
cggaaccgtcgacgtcaccttcgac

SEQ ID NO: 7168 - DNA, 25 bp, Artificial Sequence
  Synthetic Oligonucleotide
gtcggaaccgtcccggtcatctccg

SEQ ID NO: 7169 - DNA, 25 bp, Artificial Sequence
  Synthetic Oligonucleotide
tgtgaacaccacatgctatctacct

SEQ ID NO: 7170 - DNA, 25 bp, Artificial Sequence
  Synthetic Oligonucleotide
tcgtggaacctaagtttacttatac

SEQ ID NO: 7171 - DNA, 25 bp, Artificial Sequence
  Synthetic Oligonucleotide
tttgtgaacacctcttgctatctac

SEQ ID NO: 7172 - DNA, 25 bp, Artificial Sequence
  Synthetic Oligonucleotide
tcagagtatccgtaacttggttcac

SEQ ID NO: 7173 - DNA, 25 bp, Artificial Sequence
  Synthetic Oligonucleotide
gagaactccctagctgctcgttcac

SEQ ID NO: 7174 - DNA, 25 bp, Artificial Sequence
  Synthetic Oligonucleotide
gaagtaccttcttcctcggtttcgc

SEQ ID NO: 7175 - DNA, 25 bp, Artificial Sequence
  Synthetic Oligonucleotide
gagtatctttagtcacctgtatttc

SEQ ID NO: 7176 - DNA, 25 bp, Artificial Sequence
  Synthetic Oligonucleotide
acctctatgtatgccgctgtccttc

SEQ ID NO: 7177 - DNA, 25 bp, Artificial Sequence
  Synthetic Oligonucleotide
cgttactagaacaggaagtaccttc

SEQ ID NO: 7178 - DNA, 25 bp, Artificial Sequence
  Synthetic Oligonucleotide
actctacctacgtggccgtagcttc

SEQ ID NO: 7179 - DNA, 25 bp, Artificial Sequence
  Synthetic Oligonucleotide
aaacccttacgctggtccgtgaacc

SEQ ID NO: 7180 - DNA, 25 bp, Artificial Sequence
  Synthetic Oligonucleotide
tcacaggtgccgtgagtcgggaacc

SEQ ID NO: 7181 - DNA, 25 bp, Artificial Sequence
  Synthetic Oligonucleotide
catcagggtctgaggtccggacccg

SEQ ID NO: 7182 - DNA, 25 bp, Artificial Sequence
  Synthetic Oligonucleotide
attcggcgtccgtggtgaggaccac

SEQ ID NO: 7183 - DNA, 25 bp, Artificial Sequence
  Synthetic Oligonucleotide
atttggtgtacgtggtggcgaacac

SEQ ID NO: 7184 - DNA, 25 bp, Artificial Sequence
  Synthetic Oligonucleotide
atttggtgtacgtggtggcgaacac

SEQ ID NO: 7185 - DNA, 25 bp, Artificial Sequence
  Synthetic Oligonucleotide
atttggtgtacgtggtggcgaacac

SEQ ID NO: 7186 - DNA, 25 bp, Artificial Sequence
  Synthetic Oligonucleotide
aatattgggacgtgttcgcccgacc

SEQ ID NO: 7187 - DNA, 25 bp, Artificial Sequence
  Synthetic Oligonucleotide
gaaacttgtgacatgatgacacccc

SEQ ID NO: 7188 - DNA, 25 bp, Artificial Sequence
  Synthetic Oligonucleotide
catggtcgacttatgaactacactt

SEQ ID NO: 7189 - DNA, 25 bp, Artificial Sequence
  Synthetic Oligonucleotide
ccaagagtagcttcttgacccacag

SEQ ID NO: 7190 - DNA, 25 bp, Artificial Sequence
  Synthetic Oligonucleotide
cgaaagtagctgcttgtccggcgac

SEQ ID NO: 7191 - DNA, 25 bp, Artificial Sequence
  Synthetic Oligonucleotide
actgacacggcagcttaaacggcac

SEQ ID NO: 7192 - DNA, 25 bp, Artificial Sequence
  Synthetic Oligonucleotide
cagcagttctacgatggcaagtcct

SEQ ID NO: 7193 - DNA, 25 bp, Artificial Sequence
  Synthetic Oligonucleotide
aggacttgccatcgtagaactgctg

SEQ ID NO: 7194 - DNA, 25 bp, Artificial Sequence
  Synthetic Oligonucleotide
tcgaggtcaccttcgaccttactac

SEQ ID NO: 7195 - DNA, 25 bp, Artificial Sequence
  Synthetic Oligonucleotide
ttacgaggaactaaagacccggtac

SEQ ID NO: 7196 - DNA, 25 bp, Artificial Sequence
  Synthetic Oligonucleotide
tacagcgcgtgctagagcgcgagtc

SEQ ID NO: 7197 - DNA, 25 bp, Artificial Sequence
  Synthetic Oligonucleotide
ttagagttctggaacgagaggactc

SEQ ID NO: 7198 - DNA, 25 bp, Artificial Sequence
  Synthetic Oligonucleotide
ggttggtattgtggtcatacagctc

SEQ ID NO: 7199 - DNA, 25 bp, Artificial Sequence
  Synthetic Oligonucleotide
ggagtagggtttacctgaaccggtc

SEQ ID NO: 7200 - DNA, 25 bp, Artificial Sequence
  Synthetic Oligonucleotide
gctaagagttttaccgcactccatc

SEQ ID NO: 7201 - DNA, 25 bp, Artificial Sequence
  Synthetic Oligonucleotide
cagaagttcttcgcgctaaagtatc

SEQ ID NO: 7202 - DNA, 25 bp, Artificial Sequence
  Synthetic Oligonucleotide
agtgtagcctgagtcgttaaagttc

SEQ ID NO: 7203 - DNA, 25 bp, Artificial Sequence
  Synthetic Oligonucleotide
ctagaagcggaagtgcaacagttac

SEQ ID NO: 7204 - DNA, 25 bp, Artificial Sequence
  Synthetic Oligonucleotide
cacgggtggaagagctaccggaact

SEQ ID NO: 7205 - DNA, 25 bp, Artificial Sequence
  Synthetic Oligonucleotide
cacggttttcagagtatccgaaact

SEQ ID NO: 7206 - DNA, 25 bp, Artificial Sequence
  Synthetic Oligonucleotide
cggaagtgcaacagttaccacagtc

SEQ ID NO: 7207 - DNA, 25 bp, Artificial Sequence
  Synthetic Oligonucleotide
ttaagtgtctggaatacaactagtc

SEQ ID NO: 7208 - DNA, 25 bp, Artificial Sequence
  Synthetic Oligonucleotide
tatataagtagctgctgaacaaatc

SEQ ID NO: 7209 - DNA, 25 bp, Artificial Sequence
  Synthetic Oligonucleotide
ccgtaaaagtgtatctggggacatc

SEQ ID NO: 7210 - DNA, 25 bp, Artificial Sequence
  Synthetic Oligonucleotide
gcgtaggacgggctcctggcccacc

SEQ ID NO: 7211 - DNA, 25 bp, Artificial Sequence
  Synthetic Oligonucleotide
agacgaccagctgggcacgcctcct

SEQ ID NO: 7212 - DNA, 25 bp, Artificial Sequence
  Synthetic Oligonucleotide
gagcggaagcatgagcagctagcct

SEQ ID NO: 7213 - DNA, 25 bp, Artificial Sequence
  Synthetic Oligonucleotide
gtgtggtaaccagagcacaagagac

SEQ ID NO: 7214 - DNA, 25 bp, Artificial Sequence
  Synthetic Oligonucleotide
tggtctgatgggacgacaagagtac

SEQ ID NO: 7215 - DNA, 25 bp, Artificial Sequence
  Synthetic Oligonucleotide
ggtctcagtacaggaaccattgtac

SEQ ID NO: 7216 - DNA, 25 bp, Artificial Sequence
  Synthetic Oligonucleotide
tgctttagtcacggaaacttgtgac

SEQ ID NO: 7217 - DNA, 25 bp, Artificial Sequence
  Synthetic Oligonucleotide
acgtattttagtccggaaactttgc

SEQ ID NO: 7218 - DNA, 25 bp, Artificial Sequence
  Synthetic Oligonucleotide
aattttcacggttacagttttgtac

SEQ ID NO: 7219 - DNA, 25 bp, Artificial Sequence
  Synthetic Oligonucleotide
cattatgggttagtactatttcgtc

SEQ ID NO: 7220 - DNA, 25 bp, Artificial Sequence
  Synthetic Oligonucleotide
cttcgatagcgctgattttttcgac

SEQ ID NO: 7221 - DNA, 25 bp, Artificial Sequence
  Synthetic Oligonucleotide
tgtacgatccggtttttaggttgtc

SEQ ID NO: 7222 - DNA, 25 bp, Artificial Sequence
  Synthetic Oligonucleotide
ctgcggcagcggtctcagctcgtgc

SEQ ID NO: 7223 - DNA, 25 bp, Artificial Sequence
  Synthetic Oligonucleotide
gtagaggccgggtcactagccagcg

SEQ ID NO: 7224 - DNA, 25 bp, Artificial Sequence
  Synthetic Oligonucleotide
gaagccgcgccgtaagccactagcg

SEQ ID NO: 7225 - DNA, 25 bp, Artificial Sequence
  Synthetic Oligonucleotide
gaacgtgtaccgcctgggcaacagc

SEQ ID NO: 7226 - DNA, 25 bp, Artificial Sequence
  Synthetic Oligonucleotide
cagtagttaccaatgcttcacccgc

SEQ ID NO: 7227 - DNA, 25 bp, Artificial Sequence
  Synthetic Oligonucleotide
cagtgttagaaactgtaccacaagc

SEQ ID NO: 7228 - DNA, 25 bp, Artificial Sequence
  Synthetic Oligonucleotide
aaggtaaaggaaggtgtcccgaagc

SEQ ID NO: 7229 - DNA, 25 bp, Artificial Sequence
  Synthetic Oligonucleotide
aaggtaaaggaaggtgtcccgaagc

SEQ ID NO: 7230 - DNA, 25 bp, Artificial Sequence
  Synthetic Oligonucleotide
ctgttagaagagtcgtttccaaggt

SEQ ID NO: 7231 - DNA, 25 bp, Artificial Sequence
  Synthetic Oligonucleotide
ctgttagaacaagttcagcggtagg

SEQ ID NO: 7232 - DNA, 25 bp, Artificial Sequence
  Synthetic Oligonucleotide
ttctatacaaaagtagccctctgtc

SEQ ID NO: 7233 - DNA, 25 bp, Artificial Sequence
  Synthetic Oligonucleotide
gacccggtaagaggaatctctcttc

SEQ ID NO: 7234 - DNA, 25 bp, Artificial Sequence
  Synthetic Oligonucleotide
agacccatagttgcttctccttgtc

SEQ ID NO: 7235 - DNA, 25 bp, Artificial Sequence
  Synthetic Oligonucleotide
gccggttattccatccgaagtagtc

SEQ ID NO: 7236 - DNA, 25 bp, Artificial Sequence
  Synthetic Oligonucleotide
gtaaggatacttccttccgaccttc

SEQ ID NO: 7237 - DNA, 25 bp, Artificial Sequence
  Synthetic Oligonucleotide
gtggtagagtcttcctatcaatttc

SEQ ID NO: 7238 - DNA, 25 bp, Artificial Sequence
  Synthetic Oligonucleotide
cgagaagagcgatgcttgaagttgc

SEQ ID NO: 7239 - DNA, 25 bp, Artificial Sequence
  Synthetic Oligonucleotide
tcagcagacgtttcctaagatgggc

SEQ ID NO: 7240 - DNA, 25 bp, Artificial Sequence
  Synthetic Oligonucleotide
cggcagaagctcgacgaaaggtcgc

SEQ ID NO: 7241 - DNA, 25 bp, Artificial Sequence
  Synthetic Oligonucleotide
ctgccgctgctcgagctgtaggagc

SEQ ID NO: 7242 - DNA, 25 bp, Artificial Sequence
  Synthetic Oligonucleotide
cggacgcggcgctcgtctaagcagc

SEQ ID NO: 7243 - DNA, 25 bp, Artificial Sequence
  Synthetic Oligonucleotide
aacgaggtacgttctagcttgcagc

SEQ ID NO: 7244 - DNA, 25 bp, Artificial Sequence
  Synthetic Oligonucleotide
gtccaaaaagatctgccgtccagtc

SEQ ID NO: 7245 - DNA, 25 bp, Artificial Sequence
  Synthetic Oligonucleotide
caagctaacctatgaagtctcactc

SEQ ID NO: 7246 - DNA, 25 bp, Artificial Sequence
  Synthetic Oligonucleotide
ggtagagtcttcctatcaatttccg

SEQ ID NO: 7247 - DNA, 25 bp, Artificial Sequence
  Synthetic Oligonucleotide
tggtagagtcttcctatcaatttcc

SEQ ID NO: 7248 - DNA, 25 bp, Artificial Sequence
  Synthetic Oligonucleotide
cagaaagagttagttaaattctcgc

SEQ ID NO: 7249 - DNA, 25 bp, Artificial Sequence
  Synthetic Oligonucleotide
gacaaaagagaagaagacatccgcc

SEQ ID NO: 7250 - DNA, 25 bp, Artificial Sequence
  Synthetic Oligonucleotide
acaaaagagaagaagacatccgccc

SEQ ID NO: 7251 - DNA, 25 bp, Artificial Sequence
  Synthetic Oligonucleotide
aaaaggtaatagtaaggtgcgccac

SEQ ID NO: 7252 - DNA, 25 bp, Artificial Sequence
  Synthetic Oligonucleotide
gaagaggtatagtagggtcaaccac

SEQ ID NO: 7253 - DNA, 25 bp, Artificial Sequence
  Synthetic Oligonucleotide
cagcagttctacgatggcaagtcct

SEQ ID NO: 7254 - DNA, 25 bp, Artificial Sequence
  Synthetic Oligonucleotide
ttactgtaacgttaagcggtcgttc

SEQ ID NO: 7255 - DNA, 25 bp, Artificial Sequence
  Synthetic Oligonucleotide
tttccgattagttcgagcctctatc

SEQ ID NO: 7256 - DNA, 25 bp, Artificial Sequence
  Synthetic Oligonucleotide
ttatcatgagtatctagagacccac

SEQ ID NO: 7257 - DNA, 25 bp, Artificial Sequence
  Synthetic Oligonucleotide
ttcacggaagagatgtggacgccac

SEQ ID NO: 7258 - DNA, 25 bp, Artificial Sequence
  Synthetic Oligonucleotide
agtaccggaacatctgtggaaccag

SEQ ID NO: 7259 - DNA, 25 bp, Artificial Sequence
  Synthetic Oligonucleotide
atccgctattacgtggacgaaatat

SEQ ID NO: 7260 - DNA, 25 bp, Artificial Sequence
  Synthetic Oligonucleotide
ttgctattgtgacgtagtgtcatac

SEQ ID NO: 7261 - DNA, 25 bp, Artificial Sequence
  Synthetic Oligonucleotide
ctttgttgtcttcgaagagttatac

SEQ ID NO: 7262 - DNA, 25 bp, Artificial Sequence
  Synthetic Oligonucleotide
tttctgtagatcatcatggttctac

SEQ ID NO: 7263 - DNA, 25 bp, Artificial Sequence
  Synthetic Oligonucleotide
ctagtgagtcacttatctgatatac

SEQ ID NO: 7264 - DNA, 25 bp, Artificial Sequence
  Synthetic Oligonucleotide
aggtcgttgcgattttagctagtcg

SEQ ID NO: 7265 - DNA, 25 bp, Artificial Sequence
  Synthetic Oligonucleotide
gaataaactttccgattcttgctgg

SEQ ID NO: 7266 - DNA, 25 bp, Artificial Sequence
  Synthetic Oligonucleotide
aaacgagccccgactctacttttgg

SEQ ID NO: 7267 - DNA, 25 bp, Artificial Sequence
  Synthetic Oligonucleotide
agctaccaccggacgtattttagtc

SEQ ID NO: 7268 - DNA, 25 bp, Artificial Sequence
  Synthetic Oligonucleotide
aacagcctcgagagcggtagttgac

SEQ ID NO: 7269 - DNA, 25 bp, Artificial Sequence
  Synthetic Oligonucleotide
aaaactggtgagtcacgacgttgac

SEQ ID NO: 7270 - DNA, 25 bp, Artificial Sequence
  Synthetic Oligonucleotide
agtcacactgtgtcctacgctcgac

SEQ ID NO: 7271 - DNA, 25 bp, Artificial Sequence
  Synthetic Oligonucleotide
ctggaactactgtacacacctgtac

SEQ ID NO: 7272 - DNA, 25 bp, Artificial Sequence
  Synthetic Oligonucleotide
agcgagtcgtctccaccacttgtac

SEQ ID NO: 7273 - DNA, 25 bp, Artificial Sequence
  Synthetic Oligonucleotide
ggggtcgtagtttccaccttcttac

SEQ ID NO: 7274 - DNA, 25 bp, Artificial Sequence
  Synthetic Oligonucleotide
ccggtgcgcgtcgagcaacatcttc

SEQ ID NO: 7275 - DNA, 25 bp, Artificial Sequence
  Synthetic Oligonucleotide
tcgtgttccggtacgctaagctttt

SEQ ID NO: 7276 - DNA, 25 bp, Artificial Sequence
  Synthetic Oligonucleotide
tttagcgtcgagggcgtaattttcg

SEQ ID NO: 7277 - DNA, 25 bp, Artificial Sequence
  Synthetic Oligonucleotide
tttaatcaggacaatgtcatctacg

SEQ ID NO: 7278 - DNA, 25 bp, Artificial Sequence
  Synthetic Oligonucleotide
ctgttaaagagaaagtcgtcaccac

SEQ ID NO: 7279 - DNA, 25 bp, Artificial Sequence
  Synthetic Oligonucleotide
cggtgtagtatatgcatttctccac

SEQ ID NO: 7280 - DNA, 25 bp, Artificial Sequence
  Synthetic Oligonucleotide
ccggtttagctaagagttttaccgc

SEQ ID NO: 7281 - DNA, 25 bp, Artificial Sequence
  Synthetic Oligonucleotide
gagttctagaagtagttcatcagtc

SEQ ID NO: 7282 - DNA, 25 bp, Artificial Sequence
  Synthetic Oligonucleotide
gaacttgtacatccagtacatcagc

SEQ ID NO: 7283 - DNA, 25 bp, Artificial Sequence
  Synthetic Oligonucleotide
acggatccttagacggaccatcacc

SEQ ID NO: 7284 - DNA, 25 bp, Artificial Sequence
  Synthetic Oligonucleotide
aggagtcaacactcggtgaacaccc

SEQ ID NO: 7285 - DNA, 25 bp, Artificial Sequence
  Synthetic Oligonucleotide
aggtgccgagagtcgggaacctacc

SEQ ID NO: 7286 - DNA, 25 bp, Artificial Sequence
  Synthetic Oligonucleotide
gaggagccatatcttaaactctctc

SEQ ID NO: 7287 - DNA, 25 bp, Artificial Sequence
  Synthetic Oligonucleotide
aagtagaccattaccaagtccttcg

SEQ ID NO: 7288 - DNA, 25 bp, Artificial Sequence
  Synthetic Oligonucleotide
tattagccagtgagcatatcttgtc

SEQ ID NO: 7289 - DNA, 25 bp, Artificial Sequence
  Synthetic Oligonucleotide
gtgccgctgttacaatcgtagtatc

SEQ ID NO: 7290 - DNA, 25 bp, Artificial Sequence
  Synthetic Oligonucleotide
aggcgacgtgtgtgaatcgtgttac

SEQ ID NO: 7291 - DNA, 25 bp, Artificial Sequence
  Synthetic Oligonucleotide
aaggtcgaggcgaagtaacttattc

SEQ ID NO: 7292 - DNA, 25 bp, Artificial Sequence
  Synthetic Oligonucleotide
cagtgtgtcatacagagttttgttc

SEQ ID NO: 7293 - DNA, 25 bp, Artificial Sequence
  Synthetic Oligonucleotide
ctctgtcccatcgaatagttgtccg

SEQ ID NO: 7294 - DNA, 25 bp, Artificial Sequence
  Synthetic Oligonucleotide
tcgtcagcccacgagaatgggtgac

SEQ ID NO: 7295 - DNA, 25 bp, Artificial Sequence
  Synthetic Oligonucleotide
ggctaagacccagagcaggaggtcc

SEQ ID NO: 7296 - DNA, 25 bp, Artificial Sequence
  Synthetic Oligonucleotide
gctaagacccagagcaggaggtccg

SEQ ID NO: 7297 - DNA, 25 bp, Artificial Sequence
  Synthetic Oligonucleotide
gaactgccctagagcgaggaccttc

SEQ ID NO: 7298 - DNA, 25 bp, Artificial Sequence
  Synthetic Oligonucleotide
aaacctccctagagcgaggaccttc

SEQ ID NO: 7299 - DNA, 25 bp, Artificial Sequence
  Synthetic Oligonucleotide
caaatcttttgagaagagtccttct

SEQ ID NO: 7300 - DNA, 25 bp, Artificial Sequence
  Synthetic Oligonucleotide
caatgatagtgaggtagggtccatc

SEQ ID NO: 7301 - DNA, 25 bp, Artificial Sequence
  Synthetic Oligonucleotide
actgttaggtcttgtcctcgcatcg

SEQ ID NO: 7302 - DNA, 25 bp, Artificial Sequence
  Synthetic Oligonucleotide
gaattgtcggtctgatcgcccactc

SEQ ID NO: 7303 - DNA, 25 bp, Artificial Sequence
  Synthetic Oligonucleotide
gggagattcttcgatcgacgcctcc

SEQ ID NO: 7304 - DNA, 25 bp, Artificial Sequence
  Synthetic Oligonucleotide
gggagattcttcgatcgacgcctcc

SEQ ID NO: 7305 - DNA, 25 bp, Artificial Sequence
  Synthetic Oligonucleotide
ctgaaagttatctagcgtcgctccc

SEQ ID NO: 7306 - DNA, 25 bp, Artificial Sequence
  Synthetic Oligonucleotide
tccttaaggtgctaggctcatctcc

SEQ ID NO: 7307 - DNA, 25 bp, Artificial Sequence
  Synthetic Oligonucleotide
tccttatggtgtagggcgtcccaat

SEQ ID NO: 7308 - DNA, 25 bp, Artificial Sequence
  Synthetic Oligonucleotide
ccttatggtgtagggcgtcccaatt

SEQ ID NO: 7309 - DNA, 25 bp, Artificial Sequence
  Synthetic Oligonucleotide
tatatgggtaagcagtctcctcatc

SEQ ID NO: 7310 - DNA, 25 bp, Artificial Sequence
  Synthetic Oligonucleotide
ttacaggtgaaacagtgttctcttc

SEQ ID NO: 7311 - DNA, 25 bp, Artificial Sequence
  Synthetic Oligonucleotide
ttataaggtttacagtggtctctcc

SEQ ID NO: 7312 - DNA, 25 bp, Artificial Sequence
  Synthetic Oligonucleotide
caacacagtttcctgtgacgcaacc

SEQ ID NO: 7313 - DNA, 25 bp, Artificial Sequence
  Synthetic Oligonucleotide
gcaaaaggctacctcaacctgtacc

SEQ ID NO: 7314 - DNA, 25 bp, Artificial Sequence
  Synthetic Oligonucleotide
aggacttgccatcgtagaactgctg

SEQ ID NO: 7315 - DNA, 25 bp, Artificial Sequence
  Synthetic Oligonucleotide
cagcagttctacgatggcaagtcct

SEQ ID NO: 7316 - DNA, 25 bp, Artificial Sequence
  Synthetic Oligonucleotide
tcgaggtcacctacgaccttactac

SEQ ID NO: 7317 - DNA, 25 bp, Artificial Sequence
  Synthetic Oligonucleotide
ttacgaggaacttaagacccggtac

SEQ ID NO: 7318 - DNA, 25 bp, Artificial Sequence
  Synthetic Oligonucleotide
tacagcgcgtgcaagagcgcgagtc

SEQ ID NO: 7319 - DNA, 25 bp, Artificial Sequence
  Synthetic Oligonucleotide
ttagagttctggtacgagaggactc

SEQ ID NO: 7320 - DNA, 25 bp, Artificial Sequence
  Synthetic Oligonucleotide
ggttggtattgtcgtcatacagctc

SEQ ID NO: 7321 - DNA, 25 bp, Artificial Sequence
  Synthetic Oligonucleotide
ggagtagggttttcctgaaccggtc

SEQ ID NO: 7322 - DNA, 25 bp, Artificial Sequence
  Synthetic Oligonucleotide
gctaagagtttttccgcactccatc

SEQ ID NO: 7323 - DNA, 25 bp, Artificial Sequence
  Synthetic Oligonucleotide
cagaagttcttcccgctaaagtatc

SEQ ID NO: 7324 - DNA, 25 bp, Artificial Sequence
  Synthetic Oligonucleotide
agtgtagcctgactcgttaaagttc

SEQ ID NO: 7325 - DNA, 25 bp, Artificial Sequence
  Synthetic Oligonucleotide
ctagaagcggaactgcaacagttac

SEQ ID NO: 7326 - DNA, 25 bp, Artificial Sequence
  Synthetic Oligonucleotide
cacgggtggaagtgctaccggaact

SEQ ID NO: 7327 - DNA, 25 bp, Artificial Sequence
  Synthetic Oligonucleotide
cacggttttcagtgtatccgaaact

SEQ ID NO: 7328 - DNA, 25 bp, Artificial Sequence
  Synthetic Oligonucleotide
cggaagtgcaactgttaccacagtc

SEQ ID NO: 7329 - DNA, 25 bp, Artificial Sequence
  Synthetic Oligonucleotide
ttaagtgtctggtatacaactagtc

SEQ ID NO: 7330 - DNA, 25 bp, Artificial Sequence
  Synthetic Oligonucleotide
tatataagtagcagctgaacaaatc

SEQ ID NO: 7331 - DNA, 25 bp, Artificial Sequence
  Synthetic Oligonucleotide
ccgtaaaagtgtttctggggacatc

SEQ ID NO: 7332 - DNA, 25 bp, Artificial Sequence
  Synthetic Oligonucleotide
gcgtaggacggggtcctggcccacc

SEQ ID NO: 7333 - DNA, 25 bp, Artificial Sequence
  Synthetic Oligonucleotide
agacgaccagctcggcacgcctcct

SEQ ID NO: 7334 - DNA, 25 bp, Artificial Sequence
  Synthetic Oligonucleotide
gagcggaagcatcagcagctagcct

SEQ ID NO: 7335 - DNA, 25 bp, Artificial Sequence
  Synthetic Oligonucleotide
gtgtggtaaccacagcacaagagac

SEQ ID NO: 7336 - DNA, 25 bp, Artificial Sequence
  Synthetic Oligonucleotide
tggtctgatgggtcgacaagagtac

SEQ ID NO: 7337 - DNA, 25 bp, Artificial Sequence
  Synthetic Oligonucleotide
ggtctcagtacacgaaccattgtac

SEQ ID NO: 7338 - DNA, 25 bp, Artificial Sequence
  Synthetic Oligonucleotide
tgctttagtcaccgaaacttgtgac

SEQ ID NO: 7339 - DNA, 25 bp, Artificial Sequence
  Synthetic Oligonucleotide
acgtattttagtgcggaaactttgc

SEQ ID NO: 7340 - DNA, 25 bp, Artificial Sequence
  Synthetic Oligonucleotide
aattttcacggtaacagttttgtac

SEQ ID NO: 7341 - DNA, 25 bp, Artificial Sequence
  Synthetic Oligonucleotide
cattatgggttactactatttcgtc

SEQ ID NO: 7342 - DNA, 25 bp, Artificial Sequence
  Synthetic Oligonucleotide
cttcgatagcgcagattttttcgac

SEQ ID NO: 7343 - DNA, 25 bp, Artificial Sequence
  Synthetic Oligonucleotide
tgtacgatccggattttaggttgtc

SEQ ID NO: 7344 - DNA, 25 bp, Artificial Sequence
  Synthetic Oligonucleotide
ctgcggcagcggactcagctcgtgc

SEQ ID NO: 7345 - DNA, 25 bp, Artificial Sequence
  Synthetic Oligonucleotide
gtagaggccgggacactagccagcg

SEQ ID NO: 7346 - DNA, 25 bp, Artificial Sequence
  Synthetic Oligonucleotide
gaagccgcgccgaaagccactagcg

SEQ ID NO: 7347 - DNA, 25 bp, Artificial Sequence
  Synthetic Oligonucleotide
gaacgtgtaccggctgggcaacagc

SEQ ID NO: 7348 - DNA, 25 bp, Artificial Sequence
  Synthetic Oligonucleotide
cagtagttaccattgcttcacccgc

SEQ ID NO: 7349 - DNA, 25 bp, Artificial Sequence
  Synthetic Oligonucleotide
cagtgttagaaagtgtaccacaagc

SEQ ID NO: 7350 - DNA, 25 bp, Artificial Sequence
  Synthetic Oligonucleotide
aaggtaaaggaacgtgtcccgaagc

SEQ ID NO: 7351 - DNA, 25 bp, Artificial Sequence
  Synthetic Oligonucleotide
aaggtaaaggaacgtgtcccgaagc

SEQ ID NO: 7352 - DNA, 25 bp, Artificial Sequence
  Synthetic Oligonucleotide
ctgttagaagagacgtttccaaggt

SEQ ID NO: 7353 - DNA, 25 bp, Artificial Sequence
  Synthetic Oligonucleotide
ctgttagaacaacttcagcggtagg

SEQ ID NO: 7354 - DNA, 25 bp, Artificial Sequence
  Synthetic Oligonucleotide
ttctatacaaaactagccctctgtc

SEQ ID NO: 7355 - DNA, 25 bp, Artificial Sequence
  Synthetic Oligonucleotide
gacccggtaagacgaatctctcttc

SEQ ID NO: 7356 - DNA, 25 bp, Artificial Sequence
  Synthetic Oligonucleotide
agacccatagttccttctccttgtc

SEQ ID NO: 7357 - DNA, 25 bp, Artificial Sequence
  Synthetic Oligonucleotide
gccggttattccttccgaagtagtc

SEQ ID NO: 7358 - DNA, 25 bp, Artificial Sequence
  Synthetic Oligonucleotide
gtaaggatacttgcttccgaccttc

SEQ ID NO: 7359 - DNA, 25 bp, Artificial Sequence
  Synthetic Oligonucleotide
gtggtagagtctacctatcaatttc

SEQ ID NO: 7360 - DNA, 25 bp, Artificial Sequence
  Synthetic Oligonucleotide
cgagaagagcgaagcttgaagttgc

SEQ ID NO: 7361 - DNA, 25 bp, Artificial Sequence
  Synthetic Oligonucleotide
tcagcagacgttacctaagatgggc

SEQ ID NO: 7362 - DNA, 25 bp, Artificial Sequence
  Synthetic Oligonucleotide
cggcagaagctccacgaaaggtcgc

SEQ ID NO: 7363 - DNA, 25 bp, Artificial Sequence
  Synthetic Oligonucleotide
ctgccgctgctccagctgtaggagc

SEQ ID NO: 7364 - DNA, 25 bp, Artificial Sequence
  Synthetic Oligonucleotide
cggacgcggcgcacgtctaagcagc

SEQ ID NO: 7365 - DNA, 25 bp, Artificial Sequence
  Synthetic Oligonucleotide
aacgaggtacgtactagcttgcagc

SEQ ID NO: 7366 - DNA, 25 bp, Artificial Sequence
  Synthetic Oligonucleotide
gtccaaaaagatgtgccgtccagtc

SEQ ID NO: 7367 - DNA, 25 bp, Artificial Sequence
  Synthetic Oligonucleotide
caagctaacctaagaagtctcactc

SEQ ID NO: 7368 - DNA, 25 bp, Artificial Sequence
  Synthetic Oligonucleotide
ggtagagtcttcgtatcaatttccg

SEQ ID NO: 7369 - DNA, 25 bp, Artificial Sequence
  Synthetic Oligonucleotide
tggtagagtcttgctatcaatttcc

SEQ ID NO: 7370 - DNA, 25 bp, Artificial Sequence
  Synthetic Oligonucleotide
cagaaagagttacttaaattctcgc

SEQ ID NO: 7371 - DNA, 25 bp, Artificial Sequence
  Synthetic Oligonucleotide
gacaaaagagaacaagacatccgcc

SEQ ID NO: 7372 - DNA, 25 bp, Artificial Sequence
  Synthetic Oligonucleotide
acaaaagagaagtagacatccgccc

SEQ ID NO: 7373 - DNA, 25 bp, Artificial Sequence
  Synthetic Oligonucleotide
aaaaggtaatagaaaggtgcgccac

SEQ ID NO: 7374 - DNA, 25 bp, Artificial Sequence
  Synthetic Oligonucleotide
gaagaggtatagaagggtcaaccac

SEQ ID NO: 7375 - DNA, 25 bp, Artificial Sequence
  Synthetic Oligonucleotide
cagcagttctacgatggcaagtcct

SEQ ID NO: 7376 - DNA, 25 bp, Artificial Sequence
  Synthetic Oligonucleotide
cagcagttctacgatggcaagtcct

SEQ ID NO: 7377 - DNA, 25 bp, Artificial Sequence
  Synthetic Oligonucleotide
cagcagttctacgatggcaagtcct

SEQ ID NO: 7378 - DNA, 25 bp, Artificial Sequence
  Synthetic Oligonucleotide
cagcagttctacgatggcaagtcct

SEQ ID NO: 7379 - DNA, 25 bp, Artificial Sequence
  Synthetic Oligonucleotide
cagcagttctacgatggcaagtcct

SEQ ID NO: 7380 - DNA, 25 bp, Artificial Sequence
  Synthetic Oligonucleotide
ttactgtaacgtaaagcggtcgttc

SEQ ID NO: 7381 - DNA, 25 bp, Artificial Sequence
  Synthetic Oligonucleotide
tttccgattagtacgagcctctatc

SEQ ID NO: 7382 - DNA, 25 bp, Artificial Sequence
  Synthetic Oligonucleotide
ttatcatgagtaactagagacccac

SEQ ID NO: 7383 - DNA, 25 bp, Artificial Sequence
  Synthetic Oligonucleotide
ttcacggaagagttgtggacgccac

SEQ ID NO: 7384 - DNA, 25 bp, Artificial Sequence
  Synthetic Oligonucleotide
agtaccggaacaactgtggaaccag

SEQ ID NO: 7385 - DNA, 25 bp, Artificial Sequence
  Synthetic Oligonucleotide
atccgctattacctggacgaaatat

SEQ ID NO: 7386 - DNA, 25 bp, Artificial Sequence
  Synthetic Oligonucleotide
ttgctattgtgaggtagtgtcatac

SEQ ID NO: 7387 - DNA, 25 bp, Artificial Sequence
  Synthetic Oligonucleotide
ctttgttgtcttggaagagttatac

SEQ ID NO: 7388 - DNA, 25 bp, Artificial Sequence
  Synthetic Oligonucleotide
tttctgtagatcttcatggttctac

SEQ ID NO: 7389 - DNA, 25 bp, Artificial Sequence
  Synthetic Oligonucleotide
ctagtgagtcacatatctgatatac

SEQ ID NO: 7390 - DNA, 25 bp, Artificial Sequence
  Synthetic Oligonucleotide
aggtcgttgcgaatttagctagtcg

SEQ ID NO: 7391 - DNA, 25 bp, Artificial Sequence
  Synthetic Oligonucleotide
gaataaactttcggattcttgctgg

SEQ ID NO: 7392 - DNA, 25 bp, Artificial Sequence
  Synthetic Oligonucleotide
aaacgagccccgtctctacttttgg

SEQ ID NO: 7393 - DNA, 25 bp, Artificial Sequence
  Synthetic Oligonucleotide
agctaccaccggtcgtattttagtc

SEQ ID NO: 7394 - DNA, 25 bp, Artificial Sequence
  Synthetic Oligonucleotide
aacagcctcgagtgcggtagttgac

SEQ ID NO: 7395 - DNA, 25 bp, Artificial Sequence
  Synthetic Oligonucleotide
aaaactggtgagacacgacgttgac

SEQ ID NO: 7396 - DNA, 25 bp, Artificial Sequence
  Synthetic Oligonucleotide
agtcacactgtgacctacgctcgac

SEQ ID NO: 7397 - DNA, 25 bp, Artificial Sequence
  Synthetic Oligonucleotide
ctggaactactgaacacacctgtac

SEQ ID NO: 7398 - DNA, 25 bp, Artificial Sequence
  Synthetic Oligonucleotide
agcgagtcgtctgcaccacttgtac

SEQ ID NO: 7399 - DNA, 25 bp, Artificial Sequence
  Synthetic Oligonucleotide
ggggtcgtagttaccaccttcttac

SEQ ID NO: 7400 - DNA, 25 bp, Artificial Sequence
  Synthetic Oligonucleotide
ccggtgcgcgtccagcaacatcttc

SEQ ID NO: 7401 - DNA, 25 bp, Artificial Sequence
  Synthetic Oligonucleotide
tcgtgttccggttcgctaagctttt

SEQ ID NO: 7402 - DNA, 25 bp, Artificial Sequence
  Synthetic Oligonucleotide
tttagcgtcgagcgcgtaattttcg

SEQ ID NO: 7403 - DNA, 25 bp, Artificial Sequence
  Synthetic Oligonucleotide
tttaatcaggactatgtcatctacg

SEQ ID NO: 7404 - DNA, 25 bp, Artificial Sequence
  Synthetic Oligonucleotide
ctgttaaagagatagtcgtcaccac

SEQ ID NO: 7405 - DNA, 25 bp, Artificial Sequence
  Synthetic Oligonucleotide
cggtgtagtataagcatttctccac

SEQ ID NO: 7406 - DNA, 25 bp, Artificial Sequence
  Synthetic Oligonucleotide
ccggtttagctatgagttttaccgc

SEQ ID NO: 7407 - DNA, 25 bp, Artificial Sequence
  Synthetic Oligonucleotide
gagttctagaagaagttcatcagtc

SEQ ID NO: 7408 - DNA, 25 bp, Artificial Sequence
  Synthetic Oligonucleotide
gaacttgtacatgcagtacatcagc

SEQ ID NO: 7409 - DNA, 25 bp, Artificial Sequence
  Synthetic Oligonucleotide
acggatccttagtcggaccatcacc

SEQ ID NO: 7410 - DNA, 25 bp, Artificial Sequence
  Synthetic Oligonucleotide
aggagtcaacacacggtgaacaccc

SEQ ID NO: 7411 - DNA, 25 bp, Artificial Sequence
  Synthetic Oligonucleotide
aggtgccgagagacgggaacctacc

SEQ ID NO: 7412 - DNA, 25 bp, Artificial Sequence
  Synthetic Oligonucleotide
gaggagccatatgttaaactctctc

SEQ ID NO: 7413 - DNA, 25 bp, Artificial Sequence
  Synthetic Oligonucleotide
aagtagaccatttccaagtccttcg

SEQ ID NO: 7414 - DNA, 25 bp, Artificial Sequence
  Synthetic Oligonucleotide
tattagccagtgtgcatatcttgtc

SEQ ID NO: 7415 - DNA, 25 bp, Artificial Sequence
  Synthetic Oligonucleotide
gtgccgctgttagaatcgtagtatc

SEQ ID NO: 7416 - DNA, 25 bp, Artificial Sequence
  Synthetic Oligonucleotide
aggcgacgtgtgagaatcgtgttac

SEQ ID NO: 7417 - DNA, 25 bp, Artificial Sequence
  Synthetic Oligonucleotide
aaggtcgaggcgtagtaacttattc

SEQ ID NO: 7418 - DNA, 25 bp, Artificial Sequence
  Synthetic Oligonucleotide
cagtgtgtcatagagagttttgttc

SEQ ID NO: 7419 - DNA, 25 bp, Artificial Sequence
  Synthetic Oligonucleotide
ctctgtcccatccaatagttgtccg

SEQ ID NO: 7420 - DNA, 25 bp, Artificial Sequence
  Synthetic Oligonucleotide
tcgtcagcccaccagaatgggtgac

SEQ ID NO: 7421 - DNA, 25 bp, Artificial Sequence
  Synthetic Oligonucleotide
ggctaagacccacagcaggaggtcc

SEQ ID NO: 7422 - DNA, 25 bp, Artificial Sequence
  Synthetic Oligonucleotide
gctaagacccagtgcaggaggtccg

SEQ ID NO: 7423 - DNA, 25 bp, Artificial Sequence
  Synthetic Oligonucleotide
gaactgccctagtgcgaggaccttc

SEQ ID NO: 7424 - DNA, 25 bp, Artificial Sequence
  Synthetic Oligonucleotide
aaacctccctagtgcgaggaccttc

SEQ ID NO: 7425 - DNA, 25 bp, Artificial Sequence
  Synthetic Oligonucleotide
caaatcttttgacaagagtccttct

SEQ ID NO: 7426 - DNA, 25 bp, Artificial Sequence
  Synthetic Oligonucleotide
caatgatagtgacgtagggtccatc

SEQ ID NO: 7427 - DNA, 25 bp, Artificial Sequence
  Synthetic Oligonucleotide
actgttaggtctagtcctcgcatcg

SEQ ID NO: 7428 - DNA, 25 bp, Artificial Sequence
  Synthetic Oligonucleotide
gaattgtcggtcagatcgcccactc

SEQ ID NO: 7429 - DNA, 25 bp, Artificial Sequence
  Synthetic Oligonucleotide
gggagattcttccatcgacgcctcc

SEQ ID NO: 7430 - DNA, 25 bp, Artificial Sequence
  Synthetic Oligonucleotide
gggagattcttccatcgacgcctcc

SEQ ID NO: 7431 - DNA, 25 bp, Artificial Sequence
  Synthetic Oligonucleotide
ctgaaagttatcaagcgtcgctccc

SEQ ID NO: 7432 - DNA, 25 bp, Artificial Sequence
  Synthetic Oligonucleotide
tccttaaggtgcaaggctcatctcc

SEQ ID NO: 7433 - DNA, 25 bp, Artificial Sequence
  Synthetic Oligonucleotide
tccttatggtgttgggcgtcccaat

SEQ ID NO: 7434 - DNA, 25 bp, Artificial Sequence
  Synthetic Oligonucleotide
ccttatggtgtacggcgtcccaatt

SEQ ID NO: 7435 - DNA, 25 bp, Artificial Sequence
  Synthetic Oligonucleotide
tatatgggtaaggagtctcctcatc

SEQ ID NO: 7436 - DNA, 25 bp, Artificial Sequence
  Synthetic Oligonucleotide
ttacaggtgaaagagtgttctcttc

SEQ ID NO: 7437 - DNA, 25 bp, Artificial Sequence
  Synthetic Oligonucleotide
ttataaggtttagagtggtctctcc

SEQ ID NO: 7438 - DNA, 25 bp, Artificial Sequence
  Synthetic Oligonucleotide
caacacagtttcgtgtgacgcaacc

SEQ ID NO: 7439 - DNA, 25 bp, Artificial Sequence
  Synthetic Oligonucleotide
gcaaaaggctacgtcaacctgtacc

SEQ ID NO: 7440 - DNA, 25 bp, Artificial Sequence
  Synthetic Oligonucleotide
cagcagttctacgatggcaagtcct

SEQ ID NO: 7441 - DNA, 25 bp, Artificial Sequence
  Synthetic Oligonucleotide
aggacttgccatcgtagaactgctg

SEQ ID NO: 7442 - DNA, 25 bp, Artificial Sequence
  Synthetic Oligonucleotide
gtccttgtgtacctaagacccctac

SEQ ID NO: 7443 - DNA, 25 bp, Artificial Sequence
  Synthetic Oligonucleotide
ctacgggaccgtcagtctccgctac

SEQ ID NO: 7444 - DNA, 25 bp, Artificial Sequence
  Synthetic Oligonucleotide
cgtcgagatcctcgtacaccgagac

SEQ ID NO: 7445 - DNA, 25 bp, Artificial Sequence
  Synthetic Oligonucleotide
cagtggatagcgcgtctatagatac

SEQ ID NO: 7446 - DNA, 25 bp, Artificial Sequence
  Synthetic Oligonucleotide
tccatgagtgagttggactataatc

SEQ ID NO: 7447 - DNA, 25 bp, Artificial Sequence
  Synthetic Oligonucleotide
tccccggtgtgcgtcgagtaacatc

SEQ ID NO: 7448 - DNA, 25 bp, Artificial Sequence
  Synthetic Oligonucleotide
tgctcgccttatgtcggtgacatct

SEQ ID NO: 7449 - DNA, 25 bp, Artificial Sequence
  Synthetic Oligonucleotide
atggtacgagctaccccatgaactc

SEQ ID NO: 7450 - DNA, 25 bp, Artificial Sequence
  Synthetic Oligonucleotide
ttggtacatcaactccagttacttc

SEQ ID NO: 7451 - DNA, 25 bp, Artificial Sequence
  Synthetic Oligonucleotide
ctggtacatcaactccagttacttc

SEQ ID NO: 7452 - DNA, 25 bp, Artificial Sequence
  Synthetic Oligonucleotide
tcgggtcggtcaattcccggtcctc

SEQ ID NO: 7453 - DNA, 25 bp, Artificial Sequence
  Synthetic Oligonucleotide
cgaggtggttgattcttgctggtac

SEQ ID NO: 7454 - DNA, 25 bp, Artificial Sequence
  Synthetic Oligonucleotide
acgagggccataattacatgagtac

SEQ ID NO: 7455 - DNA, 25 bp, Artificial Sequence
  Synthetic Oligonucleotide
gttgaggaccaaaatctctatttac

SEQ ID NO: 7456 - DNA, 25 bp, Artificial Sequence
  Synthetic Oligonucleotide
ttgaaaggcaattctcgaccttcgt

SEQ ID NO: 7457 - DNA, 25 bp, Artificial Sequence
  Synthetic Oligonucleotide
ctgaagaggtccctgctcgaacttc

SEQ ID NO: 7458 - DNA, 25 bp, Artificial Sequence
  Synthetic Oligonucleotide
ggctaggaaggctttggcaactaag

SEQ ID NO: 7459 - DNA, 25 bp, Artificial Sequence
  Synthetic Oligonucleotide
actaggaaaggtagggacaccttcg

SEQ ID NO: 7460 - DNA, 25 bp, Artificial Sequence
  Synthetic Oligonucleotide
gagaaggttgaggagtatcgatacg

SEQ ID NO: 7461 - DNA, 25 bp, Artificial Sequence
  Synthetic Oligonucleotide
cgagtaacggttaccactactggac

SEQ ID NO: 7462 - DNA, 25 bp, Artificial Sequence
  Synthetic Oligonucleotide
cgtagaacggcgactacacccgctc

SEQ ID NO: 7463 - DNA, 25 bp, Artificial Sequence
  Synthetic Oligonucleotide
ctcgtccagtgggcgtacatgcctc

SEQ ID NO: 7464 - DNA, 25 bp, Artificial Sequence
  Synthetic Oligonucleotide
ctactccatgacgctcacgagctgc

SEQ ID NO: 7465 - DNA, 25 bp, Artificial Sequence
  Synthetic Oligonucleotide
cctcttcagcaggaccgactggagc

SEQ ID NO: 7466 - DNA, 25 bp, Artificial Sequence
  Synthetic Oligonucleotide
atctttgtaaaggacacttgttagc

SEQ ID NO: 7467 - DNA, 25 bp, Artificial Sequence
  Synthetic Oligonucleotide
atctttgtgaacaccacttgctatc

SEQ ID NO: 7468 - DNA, 25 bp, Artificial Sequence
  Synthetic Oligonucleotide
tgtttgagagcaccacactgcccgc

SEQ ID NO: 7469 - DNA, 25 bp, Artificial Sequence
  Synthetic Oligonucleotide
tgttcgaggccagaattagctgtcg

SEQ ID NO: 7470 - DNA, 25 bp, Artificial Sequence
  Synthetic Oligonucleotide
atgttacggggcagcgcataaattc

SEQ ID NO: 7471 - DNA, 25 bp, Artificial Sequence
  Synthetic Oligonucleotide
tcacggacgtttgtcaagagtattc

SEQ ID NO: 7472 - DNA, 25 bp, Artificial Sequence
  Synthetic Oligonucleotide
aagtgagttctagaagtagttcatc

SEQ ID NO: 7473 - DNA, 25 bp, Artificial Sequence
  Synthetic Oligonucleotide
aatcgtgctcgacgcagtagaaatc

SEQ ID NO: 7474 - DNA, 25 bp, Artificial Sequence
  Synthetic Oligonucleotide
agatgacccagaaccggtacaccgc

SEQ ID NO: 7475 - DNA, 25 bp, Artificial Sequence
  Synthetic Oligonucleotide
taggacccaagatgagacgaccgtc

SEQ ID NO: 7476 - DNA, 25 bp, Artificial Sequence
  Synthetic Oligonucleotide
ggaagacctacaacatcagccgctc

SEQ ID NO: 7477 - DNA, 25 bp, Artificial Sequence
  Synthetic Oligonucleotide
gcaacgagataagtaccagaggctc

SEQ ID NO: 7478 - DNA, 25 bp, Artificial Sequence
  Synthetic Oligonucleotide
acgaacgaaaaatcctgacgtgagc

SEQ ID NO: 7479 - DNA, 25 bp, Artificial Sequence
  Synthetic Oligonucleotide
cgaacgaaaaatcctgacgtgagcg

SEQ ID NO: 7480 - DNA, 25 bp, Artificial Sequence
  Synthetic Oligonucleotide
ttacataaaactggtgagtcacgac

SEQ ID NO: 7481 - DNA, 25 bp, Artificial Sequence
  Synthetic Oligonucleotide
agtataacaacgtactacggtcctc

SEQ ID NO: 7482 - DNA, 25 bp, Artificial Sequence
  Synthetic Oligonucleotide
gaatagtatagcaaatcttgttctc

SEQ ID NO: 7483 - DNA, 25 bp, Artificial Sequence
  Synthetic Oligonucleotide
gtgttacggtcaccatgctggtctc

SEQ ID NO: 7484 - DNA, 25 bp, Artificial Sequence
  Synthetic Oligonucleotide
tgtttcaccagcaactcccgttacg

SEQ ID NO: 7485 - DNA, 25 bp, Artificial Sequence
  Synthetic Oligonucleotide
gttccgtcaatcaccacgtcgatcg

SEQ ID NO: 7486 - DNA, 25 bp, Artificial Sequence
  Synthetic Oligonucleotide
tcgacgtcaagtctaaactctagtc

SEQ ID NO: 7487 - DNA, 25 bp, Artificial Sequence
  Synthetic Oligonucleotide
tgtcaataggttcattgacaattgc

SEQ ID NO: 7488 - DNA, 25 bp, Artificial Sequence
  Synthetic Oligonucleotide
gtcaaagaacctttaacgtaaatgc

SEQ ID NO: 7489 - DNA, 25 bp, Artificial Sequence
  Synthetic Oligonucleotide
tcaaacggtccttctacctttggtt

SEQ ID NO: 7490 - DNA, 25 bp, Artificial Sequence
  Synthetic Oligonucleotide
taaacggcacccatcttagtatgac

SEQ ID NO: 7491 - DNA, 25 bp, Artificial Sequence
  Synthetic Oligonucleotide
aaacagctttacgcgtactagctgc

SEQ ID NO: 7492 - DNA, 25 bp, Artificial Sequence
  Synthetic Oligonucleotide
actcaagacatatttggccacctgc

SEQ ID NO: 7493 - DNA, 25 bp, Artificial Sequence
  Synthetic Oligonucleotide
ccgcccgatagaagtggggaccctc

SEQ ID NO: 7494 - DNA, 25 bp, Artificial Sequence
  Synthetic Oligonucleotide
tcgccgactcagagtgcgggcgccc

SEQ ID NO: 7495 - DNA, 25 bp, Artificial Sequence
  Synthetic Oligonucleotide
tcgccgcgttatgcttacgggggcc

SEQ ID NO: 7496 - DNA, 25 bp, Artificial Sequence
  Synthetic Oligonucleotide
acggtcatagtctacgtcaagggtc

SEQ ID NO: 7497 - DNA, 25 bp, Artificial Sequence
  Synthetic Oligonucleotide
gtaatgtccatttatcatgtgttac

SEQ ID NO: 7498 - DNA, 25 bp, Artificial Sequence
  Synthetic Oligonucleotide
taaagcacacctaatgactgatctc

SEQ ID NO: 7499 - DNA, 25 bp, Artificial Sequence
  Synthetic Oligonucleotide
gttaagcaacatcttccatactacg

SEQ ID NO: 7500 - DNA, 25 bp, Artificial Sequence
  Synthetic Oligonucleotide
gtacaagcgaaatttagctaaatac

SEQ ID NO: 7501 - DNA, 25 bp, Artificial Sequence
  Synthetic Oligonucleotide
gatcagccgtatcaaataccaattc

SEQ ID NO: 7502 - DNA, 25 bp, Artificial Sequence
  Synthetic Oligonucleotide
tcgaccagttgaaatcgcaagtctc

SEQ ID NO: 7503 - DNA, 25 bp, Artificial Sequence
  Synthetic Oligonucleotide
cagcagttctacgatggcaagtcct

SEQ ID NO: 7504 - DNA, 25 bp, Artificial Sequence
  Synthetic Oligonucleotide
tgtgctcgactgctgtcggtacgtc

SEQ ID NO: 7505 - DNA, 25 bp, Artificial Sequence
  Synthetic Oligonucleotide
tcatcgcacggtggccgcgtacgtc

SEQ ID NO: 7506 - DNA, 25 bp, Artificial Sequence
  Synthetic Oligonucleotide
ccgactcgtcgaagaggacccgttc

SEQ ID NO: 7507 - DNA, 25 bp, Artificial Sequence
  Synthetic Oligonucleotide
ccgtcagaggtaaaggaccagtatc

SEQ ID NO: 7508 - DNA, 25 bp, Artificial Sequence
  Synthetic Oligonucleotide
ggaccccgggataaggaaccgttac

SEQ ID NO: 7509 - DNA, 25 bp, Artificial Sequence
  Synthetic Oligonucleotide
tccctcgcgcattgggagtatctac

SEQ ID NO: 7510 - DNA, 25 bp, Artificial Sequence
  Synthetic Oligonucleotide
ctgactgtcaaattgcggactgtac

SEQ ID NO: 7511 - DNA, 25 bp, Artificial Sequence
  Synthetic Oligonucleotide
ataattcatacttggcgaacggtac

SEQ ID NO: 7512 - DNA, 25 bp, Artificial Sequence
  Synthetic Oligonucleotide
tgatcatggtaggcgtacacttact

SEQ ID NO: 7513 - DNA, 25 bp, Artificial Sequence
  Synthetic Oligonucleotide
cgttacctgtgggtcgtcgacttac

SEQ ID NO: 7514 - DNA, 25 bp, Artificial Sequence
  Synthetic Oligonucleotide
ggttgttacatacgattgtctattc

SEQ ID NO: 7515 - DNA, 25 bp, Artificial Sequence
  Synthetic Oligonucleotide
gtttacgtcagtcctttcgttaatc

SEQ ID NO: 7516 - DNA, 25 bp, Artificial Sequence
  Synthetic Oligonucleotide
atctcgacgtaagggtttgttgagc

SEQ ID NO: 7517 - DNA, 25 bp, Artificial Sequence
  Synthetic Oligonucleotide
aaatcgtaaaacgagtttctttgtc

SEQ ID NO: 7518 - DNA, 25 bp, Artificial Sequence
  Synthetic Oligonucleotide
aaaagcagctaaatgttcttttgtc

SEQ ID NO: 7519 - DNA, 25 bp, Artificial Sequence
  Synthetic Oligonucleotide
accgcactccatctctctttggtcg

SEQ ID NO: 7520 - DNA, 25 bp, Artificial Sequence
  Synthetic Oligonucleotide
ccgagccgccggtaccttatggtac

SEQ ID NO: 7521 - DNA, 25 bp, Artificial Sequence
  Synthetic Oligonucleotide
aagaacgagcggtaccgaatcggac

SEQ ID NO: 7522 - DNA, 25 bp, Artificial Sequence
  Synthetic Oligonucleotide
gagacagcgggtccgacctcacgtc

SEQ ID NO: 7523 - DNA, 25 bp, Artificial Sequence
  Synthetic Oligonucleotide
acgtaacgactgttagaactcactc

SEQ ID NO: 7524 - DNA, 25 bp, Artificial Sequence
  Synthetic Oligonucleotide
tcgtcgaacgacgaagcgactgctc

SEQ ID NO: 7525 - DNA, 25 bp, Artificial Sequence
  Synthetic Oligonucleotide
ggtcgaggtacacgagcgccgactc

SEQ ID NO: 7526 - DNA, 25 bp, Artificial Sequence
  Synthetic Oligonucleotide
ccggtaggtgtcagaagacccaccg

SEQ ID NO: 7527 - DNA, 25 bp, Artificial Sequence
  Synthetic Oligonucleotide
ccgtttactttgtagtaaccgtcgc

SEQ ID NO: 7528 - DNA, 25 bp, Artificial Sequence
  Synthetic Oligonucleotide
gtctgttggtatcgaggtaacccct

SEQ ID NO: 7529 - DNA, 25 bp, Artificial Sequence
  Synthetic Oligonucleotide
gagtttgcgttgtggtctacctctc

SEQ ID NO: 7530 - DNA, 25 bp, Artificial Sequence
  Synthetic Oligonucleotide
aagttgtggtggtcgacgccgcctc

SEQ ID NO: 7531 - DNA, 25 bp, Artificial Sequence
  Synthetic Oligonucleotide
gaggtgtggaagtgtacctgtcctc

SEQ ID NO: 7532 - DNA, 25 bp, Artificial Sequence
  Synthetic Oligonucleotide
gtagtgcggtgtcaaagggcctccc

SEQ ID NO: 7533 - DNA, 25 bp, Artificial Sequence
  Synthetic Oligonucleotide
ttaaggagtttaaaaggtcctcatc

SEQ ID NO: 7534 - DNA, 25 bp, Artificial Sequence
  Synthetic Oligonucleotide
aggaagtctgtaaaacagggtcatc

SEQ ID NO: 7535 - DNA, 25 bp, Artificial Sequence
  Synthetic Oligonucleotide
gtaactctgttcgagatctgtcatc

SEQ ID NO: 7536 - DNA, 25 bp, Artificial Sequence
  Synthetic Oligonucleotide
gtcggtttactctactcctgcactc

SEQ ID NO: 7537 - DNA, 25 bp, Artificial Sequence
  Synthetic Oligonucleotide
gtcggaagagctaagattgacactc

SEQ ID NO: 7538 - DNA, 25 bp, Artificial Sequence
  Synthetic Oligonucleotide
gagtcggaagaagtgttggacttac

SEQ ID NO: 7539 - DNA, 25 bp, Artificial Sequence
  Synthetic Oligonucleotide
atcgacagaagtctgtgtggtcttc

SEQ ID NO: 7540 - DNA, 25 bp, Artificial Sequence
  Synthetic Oligonucleotide
gttgtaccgatgatttatggcgttc

SEQ ID NO: 7541 - DNA, 25 bp, Artificial Sequence
  Synthetic Oligonucleotide
ttcgaccatgctaatactgagcatc

SEQ ID NO: 7542 - DNA, 25 bp, Artificial Sequence
  Synthetic Oligonucleotide
gtcgtagcaatgttgaatgttcatc

SEQ ID NO: 7543 - DNA, 25 bp, Artificial Sequence
  Synthetic Oligonucleotide
gtaaaatgacggttgtacttacttc

SEQ ID NO: 7544 - DNA, 25 bp, Artificial Sequence
  Synthetic Oligonucleotide
gtggtacatcaactctagttacttc

SEQ ID NO: 7545 - DNA, 25 bp, Artificial Sequence
  Synthetic Oligonucleotide
tggtaccggtgactcgatagtatcc

SEQ ID NO: 7546 - DNA, 25 bp, Artificial Sequence
  Synthetic Oligonucleotide
ggtatggggtaaagtcgaagttacc

SEQ ID NO: 7547 - DNA, 25 bp, Artificial Sequence
  Synthetic Oligonucleotide
ctgatgcagttacagtcgtaagccc

SEQ ID NO: 7548 - DNA, 25 bp, Artificial Sequence
  Synthetic Oligonucleotide
cccttattgcggcggcgtagcggcc

SEQ ID NO: 7549 - DNA, 25 bp, Artificial Sequence
  Synthetic Oligonucleotide
ccaccgatgtggacgccgagaggcc

SEQ ID NO: 7550 - DNA, 25 bp, Artificial Sequence
  Synthetic Oligonucleotide
accgtggtctgaacgggaggttacc

SEQ ID NO: 7551 - DNA, 25 bp, Artificial Sequence
  Synthetic Oligonucleotide
gaccctgttccgacaagagtattcc

SEQ ID NO: 7552 - DNA, 25 bp, Artificial Sequence
  Synthetic Oligonucleotide
accactgttatggcacaagttaacc

SEQ ID NO: 7553 - DNA, 25 bp, Artificial Sequence
  Synthetic Oligonucleotide
tcgcttaagcgcgtaaaggtcaccg

SEQ ID NO: 7554 - DNA, 25 bp, Artificial Sequence
  Synthetic Oligonucleotide
cccagtagtcgcggacaagttctgc

SEQ ID NO: 7555 - DNA, 25 bp, Artificial Sequence
  Synthetic Oligonucleotide
tcggaagaggtaccaccacttctgc

SEQ ID NO: 7556 - DNA, 25 bp, Artificial Sequence
  Synthetic Oligonucleotide
tcggtaagttagccatgatcgctgc

SEQ ID NO: 7557 - DNA, 25 bp, Artificial Sequence
  Synthetic Oligonucleotide
tcggagagtcggacatgttctctcc

SEQ ID NO: 7558 - DNA, 25 bp, Artificial Sequence
  Synthetic Oligonucleotide
ggggaagagctaagactgccactcc

SEQ ID NO: 7559 - DNA, 25 bp, Artificial Sequence
  Synthetic Oligonucleotide
ggtcaagaggacgaagtgcaactgc

SEQ ID NO: 7560 - DNA, 25 bp, Artificial Sequence
  Synthetic Oligonucleotide
ctgaacgaggtagaagagctgctgc

SEQ ID NO: 7561 - DNA, 25 bp, Artificial Sequence
  Synthetic Oligonucleotide
taggaggtcgacgaacggccgcttc

SEQ ID NO: 7562 - DNA, 25 bp, Artificial Sequence
  Synthetic Oligonucleotide
agaagttcgacaaagggtcgtttct

SEQ ID NO: 7563 - DNA, 25 bp, Artificial Sequence
  Synthetic Oligonucleotide
taatgttgtaacagtgtgctttctc

SEQ ID NO: 7564 - DNA, 25 bp, Artificial Sequence
  Synthetic Oligonucleotide
aaagtgtaacagttatcatagtctc

SEQ ID NO: 7565 - DNA, 25 bp, Artificial Sequence
  Synthetic Oligonucleotide
actaggagtacggtcagtcattctc

SEQ ID NO: 7566 - DNA, 25 bp, Artificial Sequence
  Synthetic Oligonucleotide
aggacttgccatcgtagaactgctg

SEQ ID NO: 7567 - DNA, 25 bp, Artificial Sequence
  Synthetic Oligonucleotide
cagcagttctacgatggcaagtcct

SEQ ID NO: 7568 - DNA, 25 bp, Artificial Sequence
  Synthetic Oligonucleotide
gtccttgtgtacgtaagacccctac

SEQ ID NO: 7569 - DNA, 25 bp, Artificial Sequence
  Synthetic Oligonucleotide
ctacgggaccgtgagtctccgctac

SEQ ID NO: 7570 - DNA, 25 bp, Artificial Sequence
  Synthetic Oligonucleotide
cgtcgagatcctggtacaccgagac

SEQ ID NO: 7571 - DNA, 25 bp, Artificial Sequence
  Synthetic Oligonucleotide
cagtggatagcgggtctatagatac

SEQ ID NO: 7572 - DNA, 25 bp, Artificial Sequence
  Synthetic Oligonucleotide
tccatgagtgagatggactataatc

SEQ ID NO: 7573 - DNA, 25 bp, Artificial Sequence
  Synthetic Oligonucleotide
tccccggtgtgcctcgagtaacatc

SEQ ID NO: 7574 - DNA, 25 bp, Artificial Sequence
  Synthetic Oligonucleotide
tgctcgccttatctcggtgacatct

SEQ ID NO: 7575 - DNA, 25 bp, Artificial Sequence
  Synthetic Oligonucleotide
atggtacgagcttccccatgaactc

SEQ ID NO: 7576 - DNA, 25 bp, Artificial Sequence
  Synthetic Oligonucleotide
ttggtacatcaagtccagttacttc

SEQ ID NO: 7577 - DNA, 25 bp, Artificial Sequence
  Synthetic Oligonucleotide
ctggtacatcaagtccagttacttc

SEQ ID NO: 7578 - DNA, 25 bp, Artificial Sequence
  Synthetic Oligonucleotide
tcgggtcggtcatttcccggtcctc

SEQ ID NO: 7579 - DNA, 25 bp, Artificial Sequence
  Synthetic Oligonucleotide
cgaggtggttgaatcttgctggtac

SEQ ID NO: 7580 - DNA, 25 bp, Artificial Sequence
  Synthetic Oligonucleotide
acgagggccatatttacatgagtac

SEQ ID NO: 7581 - DNA, 25 bp, Artificial Sequence
  Synthetic Oligonucleotide
gttgaggaccaatatctctatttac

SEQ ID NO: 7582 - DNA, 25 bp, Artificial Sequence
  Synthetic Oligonucleotide
ttgaaaggcaatactcgaccttcgt

SEQ ID NO: 7583 - DNA, 25 bp, Artificial Sequence
  Synthetic Oligonucleotide
ctgaagaggtccgtgctcgaacttc

SEQ ID NO: 7584 - DNA, 25 bp, Artificial Sequence
  Synthetic Oligonucleotide
ggctaggaaggcattggcaactaag

SEQ ID NO: 7585 - DNA, 25 bp, Artificial Sequence
  Synthetic Oligonucleotide
actaggaaaggttgggacaccttcg

SEQ ID NO: 7586 - DNA, 25 bp, Artificial Sequence
  Synthetic Oligonucleotide
gagaaggttgagcagtatcgatacg

SEQ ID NO: 7587 - DNA, 25 bp, Artificial Sequence
  Synthetic Oligonucleotide
cgagtaacggtttccactactggac

SEQ ID NO: 7588 - DNA, 25 bp, Artificial Sequence
  Synthetic Oligonucleotide
cgtagaacggcgtctacacccgctc

SEQ ID NO: 7589 - DNA, 25 bp, Artificial Sequence
  Synthetic Oligonucleotide
ctcgtccagtggccgtacatgcctc

SEQ ID NO: 7590 - DNA, 25 bp, Artificial Sequence
  Synthetic Oligonucleotide
ctactccatgaccctcacgagctgc

SEQ ID NO: 7591 - DNA, 25 bp, Artificial Sequence
  Synthetic Oligonucleotide
cctcttcagcagcaccgactggagc

SEQ ID NO: 7592 - DNA, 25 bp, Artificial Sequence
  Synthetic Oligonucleotide
atctttgtaaagcacacttgttagc

SEQ ID NO: 7593 - DNA, 25 bp, Artificial Sequence
  Synthetic Oligonucleotide
atctttgtgaactccacttgctatc

SEQ ID NO: 7594 - DNA, 25 bp, Artificial Sequence
  Synthetic Oligonucleotide
tgtttgagagcagcacactgcccgc

SEQ ID NO: 7595 - DNA, 25 bp, Artificial Sequence
  Synthetic Oligonucleotide
tgttcgaggccacaattagctgtcg

SEQ ID NO: 7596 - DNA, 25 bp, Artificial Sequence
  Synthetic Oligonucleotide
atgttacggggctgcgcataaattc

SEQ ID NO: 7597 - DNA, 25 bp, Artificial Sequence
  Synthetic Oligonucleotide
tcacggacgtttctcaagagtattc

SEQ ID NO: 7598 - DNA, 25 bp, Artificial Sequence
  Synthetic Oligonucleotide
aagtgagttctacaagtagttcatc

SEQ ID NO: 7599 - DNA, 25 bp, Artificial Sequence
  Synthetic Oligonucleotide
aatcgtgctcgaggcagtagaaatc

SEQ ID NO: 7600 - DNA, 25 bp, Artificial Sequence
  Synthetic Oligonucleotide
agatgacccagatccggtacaccgc

SEQ ID NO: 7601 - DNA, 25 bp, Artificial Sequence
  Synthetic Oligonucleotide
taggacccaagaagagacgaccgtc

SEQ ID NO: 7602 - DNA, 25 bp, Artificial Sequence
  Synthetic Oligonucleotide
ggaagacctacatcatcagccgctc

SEQ ID NO: 7603 - DNA, 25 bp, Artificial Sequence
  Synthetic Oligonucleotide
gcaacgagataactaccagaggctc

SEQ ID NO: 7604 - DNA, 25 bp, Artificial Sequence
  Synthetic Oligonucleotide
acgaacgaaaaaacctgacgtgagc

SEQ ID NO: 7605 - DNA, 25 bp, Artificial Sequence
  Synthetic Oligonucleotide
cgaacgaaaaatgctgacgtgagcg

SEQ ID NO: 7606 - DNA, 25 bp, Artificial Sequence
  Synthetic Oligonucleotide
ttacataaaactcgtgagtcacgac

SEQ ID NO: 7607 - DNA, 25 bp, Artificial Sequence
  Synthetic Oligonucleotide
agtataacaacgaactacggtcctc

SEQ ID NO: 7608 - DNA, 25 bp, Artificial Sequence
  Synthetic Oligonucleotide
gaatagtatagctaatcttgttctc

SEQ ID NO: 7609 - DNA, 25 bp, Artificial Sequence
  Synthetic Oligonucleotide
gtgttacggtcagcatgctggtctc

SEQ ID NO: 7610 - DNA, 25 bp, Artificial Sequence
  Synthetic Oligonucleotide
tgtttcaccagctactcccgttacg

SEQ ID NO: 7611 - DNA, 25 bp, Artificial Sequence
  Synthetic Oligonucleotide
gttccgtcaatctccacgtcgatcg

SEQ ID NO: 7612 - DNA, 25 bp, Artificial Sequence
  Synthetic Oligonucleotide
tcgacgtcaagtgtaaactctagtc

SEQ ID NO: 7613 - DNA, 25 bp, Artificial Sequence
  Synthetic Oligonucleotide
tgtcaataggttgattgacaattgc

SEQ ID NO: 7614 - DNA, 25 bp, Artificial Sequence
  Synthetic Oligonucleotide
gtcaaagaacctataacgtaaatgc

SEQ ID NO: 7615 - DNA, 25 bp, Artificial Sequence
  Synthetic Oligonucleotide
tcaaacggtcctactacctttggtt

SEQ ID NO: 7616 - DNA, 25 bp, Artificial Sequence
  Synthetic Oligonucleotide
taaacggcacccttcttagtatgac

SEQ ID NO: 7617 - DNA, 25 bp, Artificial Sequence
  Synthetic Oligonucleotide
aaacagctttacccgtactagctgc

SEQ ID NO: 7618 - DNA, 25 bp, Artificial Sequence
  Synthetic Oligonucleotide
actcaagacataattggccacctgc

SEQ ID NO: 7619 - DNA, 25 bp, Artificial Sequence
  Synthetic Oligonucleotide
ccgcccgatagatgtggggaccctc

SEQ ID NO: 7620 - DNA, 25 bp, Artificial Sequence
  Synthetic Oligonucleotide
tcgccgactcagtgtgcgggcgccc

SEQ ID NO: 7621 - DNA, 25 bp, Artificial Sequence
  Synthetic Oligonucleotide
tcgccgcgttatccttacgggggcc

SEQ ID NO: 7622 - DNA, 25 bp, Artificial Sequence
  Synthetic Oligonucleotide
acggtcatagtcaacgtcaagggtc

SEQ ID NO: 7623 - DNA, 25 bp, Artificial Sequence
  Synthetic Oligonucleotide
gtaatgtccattaatcatgtgttac

SEQ ID NO: 7624 - DNA, 25 bp, Artificial Sequence
  Synthetic Oligonucleotide
taaagcacaccttatgactgatctc

SEQ ID NO: 7625 - DNA, 25 bp, Artificial Sequence
  Synthetic Oligonucleotide
gttaagcaacatgttccatactacg

SEQ ID NO: 7626 - DNA, 25 bp, Artificial Sequence
  Synthetic Oligonucleotide
gtacaagcgaaaattagctaaatac

SEQ ID NO: 7627 - DNA, 25 bp, Artificial Sequence
  Synthetic Oligonucleotide
gatcagccgtatgaaataccaattc

SEQ ID NO: 7628 - DNA, 25 bp, Artificial Sequence
  Synthetic Oligonucleotide
tcgaccagttgatatcgcaagtctc

SEQ ID NO: 7629 - DNA, 25 bp, Artificial Sequence
  Synthetic Oligonucleotide
cagcagttctacgatggcaagtcct

SEQ ID NO: 7630 - DNA, 25 bp, Artificial Sequence
  Synthetic Oligonucleotide
tgtgctcgactggtgtcggtacgtc

SEQ ID NO: 7631 - DNA, 25 bp, Artificial Sequence
  Synthetic Oligonucleotide
tcatcgcacggtcgccgcgtacgtc

SEQ ID NO: 7632 - DNA, 25 bp, Artificial Sequence
  Synthetic Oligonucleotide
ccgactcgtcgatgaggacccgttc

SEQ ID NO: 7633 - DNA, 25 bp, Artificial Sequence
  Synthetic Oligonucleotide
ccgtcagaggtataggaccagtatc

SEQ ID NO: 7634 - DNA, 25 bp, Artificial Sequence
  Synthetic Oligonucleotide
ggaccccgggattaggaaccgttac

SEQ ID NO: 7635 - DNA, 25 bp, Artificial Sequence
  Synthetic Oligonucleotide
tccctcgcgcatagggagtatctac

SEQ ID NO: 7636 - DNA, 25 bp, Artificial Sequence
  Synthetic Oligonucleotide
ctgactgtcaaaatgcggactgtac

SEQ ID NO: 7637 - DNA, 25 bp, Artificial Sequence
  Synthetic Oligonucleotide
ataattcatactaggcgaacggtac

SEQ ID NO: 7638 - DNA, 25 bp, Artificial Sequence
  Synthetic Oligonucleotide
tgatcatggtagccgtacacttact

SEQ ID NO: 7639 - DNA, 25 bp, Artificial Sequence
  Synthetic Oligonucleotide
cgttacctgtggctcgtcgacttac

SEQ ID NO: 7640 - DNA, 25 bp, Artificial Sequence
  Synthetic Oligonucleotide
ggttgttacataggattgtctattc

SEQ ID NO: 7641 - DNA, 25 bp, Artificial Sequence
  Synthetic Oligonucleotide
gtttacgtcagtgctttcgttaatc

SEQ ID NO: 7642 - DNA, 25 bp, Artificial Sequence
  Synthetic Oligonucleotide
atctcgacgtaacggtttgttgagc

SEQ ID NO: 7643 - DNA, 25 bp, Artificial Sequence
  Synthetic Oligonucleotide
aaatcgtaaaaccagtttctttgtc

SEQ ID NO: 7644 - DNA, 25 bp, Artificial Sequence
  Synthetic Oligonucleotide
aaaagcagctaattgttcttttgtc

SEQ ID NO: 7645 - DNA, 25 bp, Artificial Sequence
  Synthetic Oligonucleotide
accgcactccatgtctctttggtcg

SEQ ID NO: 7646 - DNA, 25 bp, Artificial Sequence
  Synthetic Oligonucleotide
ccgagccgccggaaccttatggtac

SEQ ID NO: 7647 - DNA, 25 bp, Artificial Sequence
  Synthetic Oligonucleotide
aagaacgagcggaaccgaatcggac

SEQ ID NO: 7648 - DNA, 25 bp, Artificial Sequence
  Synthetic Oligonucleotide
gagacagcgggtgcgacctcacgtc

SEQ ID NO: 7649 - DNA, 25 bp, Artificial Sequence
  Synthetic Oligonucleotide
acgtaacgactgatagaactcactc

SEQ ID NO: 7650 - DNA, 25 bp, Artificial Sequence
  Synthetic Oligonucleotide
tcgtcgaacgaccaagcgactgctc

SEQ ID NO: 7651 - DNA, 25 bp, Artificial Sequence
  Synthetic Oligonucleotide
ggtcgaggtacaggagcgccgactc

SEQ ID NO: 7652 - DNA, 25 bp, Artificial Sequence
  Synthetic Oligonucleotide
ccggtaggtgtctgaagacccaccg

SEQ ID NO: 7653 - DNA, 25 bp, Artificial Sequence
  Synthetic Oligonucleotide
ccgtttactttgaagtaaccgtcgc

SEQ ID NO: 7654 - DNA, 25 bp, Artificial Sequence
  Synthetic Oligonucleotide
gtctgttggtatggaggtaacccct

SEQ ID NO: 7655 - DNA, 25 bp, Artificial Sequence
  Synthetic Oligonucleotide
gagtttgcgttgaggtctacctctc

SEQ ID NO: 7656 - DNA, 25 bp, Artificial Sequence
  Synthetic Oligonucleotide
aagttgtggtggacgacgccgcctc

SEQ ID NO: 7657 - DNA, 25 bp, Artificial Sequence
  Synthetic Oligonucleotide
gaggtgtggaagagtacctgtcctc

SEQ ID NO: 7658 - DNA, 25 bp, Artificial Sequence
  Synthetic Oligonucleotide
gtagtgcggtgtgaaagggcctccc

SEQ ID NO: 7659 - DNA, 25 bp, Artificial Sequence
  Synthetic Oligonucleotide
ttaaggagtttataaggtcctcatc

SEQ ID NO: 7660 - DNA, 25 bp, Artificial Sequence
  Synthetic Oligonucleotide
aggaagtctgtataacagggtcatc

SEQ ID NO: 7661 - DNA, 25 bp, Artificial Sequence
  Synthetic Oligonucleotide
gtaactctgttccagatctgtcatc

SEQ ID NO: 7662 - DNA, 25 bp, Artificial Sequence
  Synthetic Oligonucleotide
gtcggtttactcaactcctgcactc

SEQ ID NO: 7663 - DNA, 25 bp, Artificial Sequence
  Synthetic Oligonucleotide
gtcggaagagcttagattgacactc

SEQ ID NO: 7664 - DNA, 25 bp, Artificial Sequence
  Synthetic Oligonucleotide
gagtcggaagaactgttggacttac

SEQ ID NO: 7665 - DNA, 25 bp, Artificial Sequence
  Synthetic Oligonucleotide
atcgacagaagtgtgtgtggtcttc

SEQ ID NO: 7666 - DNA, 25 bp, Artificial Sequence
  Synthetic Oligonucleotide
gttgtaccgatgttttatggcgttc

SEQ ID NO: 7667 - DNA, 25 bp, Artificial Sequence
  Synthetic Oligonucleotide
ttcgaccatgcttatactgagcatc

SEQ ID NO: 7668 - DNA, 25 bp, Artificial Sequence
  Synthetic Oligonucleotide
gtcgtagcaatgatgaatgttcatc

SEQ ID NO: 7669 - DNA, 25 bp, Artificial Sequence
  Synthetic Oligonucleotide
gtaaaatgacggatgtacttacttc

SEQ ID NO: 7670 - DNA, 25 bp, Artificial Sequence
  Synthetic Oligonucleotide
gtggtacatcaagtctagttacttc

SEQ ID NO: 7671 - DNA, 25 bp, Artificial Sequence
  Synthetic Oligonucleotide
tggtaccggtgagtcgatagtatcc

SEQ ID NO: 7672 - DNA, 25 bp, Artificial Sequence
  Synthetic Oligonucleotide
ggtatggggtaatgtcgaagttacc

SEQ ID NO: 7673 - DNA, 25 bp, Artificial Sequence
  Synthetic Oligonucleotide
ctgatgcagttagagtcgtaagccc

SEQ ID NO: 7674 - DNA, 25 bp, Artificial Sequence
  Synthetic Oligonucleotide
cccttattgcgggggcgtagcggcc

SEQ ID NO: 7675 - DNA, 25 bp, Artificial Sequence
  Synthetic Oligonucleotide
ccaccgatgtggtcgccgagaggcc

SEQ ID NO: 7676 - DNA, 25 bp, Artificial Sequence
  Synthetic Oligonucleotide
accgtggtctgatcgggaggttacc

SEQ ID NO: 7677 - DNA, 25 bp, Artificial Sequence
  Synthetic Oligonucleotide
gaccctgttccgtcaagagtattcc

SEQ ID NO: 7678 - DNA, 25 bp, Artificial Sequence
  Synthetic Oligonucleotide
accactgttatgccacaagttaacc

SEQ ID NO: 7679 - DNA, 25 bp, Artificial Sequence
  Synthetic Oligonucleotide
tcgcttaagcgcctaaaggtcaccg

SEQ ID NO: 7680 - DNA, 25 bp, Artificial Sequence
  Synthetic Oligonucleotide
cccagtagtcgccgacaagttctgc

SEQ ID NO: 7681 - DNA, 25 bp, Artificial Sequence
  Synthetic Oligonucleotide
tcggaagaggtagcaccacttctgc

SEQ ID NO: 7682 - DNA, 25 bp, Artificial Sequence
  Synthetic Oligonucleotide
tcggtaagttaggcatgatcgctgc

SEQ ID NO: 7683 - DNA, 25 bp, Artificial Sequence
  Synthetic Oligonucleotide
tcggagagtcggtcatgttctctcc

SEQ ID NO: 7684 - DNA, 25 bp, Artificial Sequence
  Synthetic Oligonucleotide
ggggaagagctatgactgccactcc

SEQ ID NO: 7685 - DNA, 25 bp, Artificial Sequence
  Synthetic Oligonucleotide
ggtcaagaggaccaagtgcaactgc

SEQ ID NO: 7686 - DNA, 25 bp, Artificial Sequence
  Synthetic Oligonucleotide
ctgaacgaggtacaagagctgctgc

SEQ ID NO: 7687 - DNA, 25 bp, Artificial Sequence
  Synthetic Oligonucleotide
taggaggtcgaccaacggccgcttc

SEQ ID NO: 7688 - DNA, 25 bp, Artificial Sequence
  Synthetic Oligonucleotide
agaagttcgacatagggtcgtttct

SEQ ID NO: 7689 - DNA, 25 bp, Artificial Sequence
  Synthetic Oligonucleotide
taatgttgtaactgtgtgctttctc

SEQ ID NO: 7690 - DNA, 25 bp, Artificial Sequence
  Synthetic Oligonucleotide
aaagtgtaacagatatcatagtctc

SEQ ID NO: 7691 - DNA, 25 bp, Artificial Sequence
  Synthetic Oligonucleotide
actaggagtacgctcagtcattctc

SEQ ID NO: 7692 - DNA, 25 bp, Artificial Sequence
  Synthetic Oligonucleotide
cagcagttctacgatggcaagtcct

SEQ ID NO: 7693 - DNA, 25 bp, Artificial Sequence
  Synthetic Oligonucleotide
aggacttgccatcgtagaactgctg

SEQ ID NO: 7694 - DNA, 25 bp, Artificial Sequence
  Synthetic Oligonucleotide
gtgcgtctgcgttctggttcacttc

SEQ ID NO: 7695 - DNA, 25 bp, Artificial Sequence
  Synthetic Oligonucleotide
gggactcggactcgtgttccacctc

SEQ ID NO: 7696 - DNA, 25 bp, Artificial Sequence
  Synthetic Oligonucleotide
gggactcggactcgtgttccacctc

SEQ ID NO: 7697 - DNA, 25 bp, Artificial Sequence
  Synthetic Oligonucleotide
accagatggctgctatctacccttc

SEQ ID NO: 7698 - DNA, 25 bp, Artificial Sequence
  Synthetic Oligonucleotide
gtaccgaatcggaccttgaccttcc

SEQ ID NO: 7699 - DNA, 25 bp, Artificial Sequence
  Synthetic Oligonucleotide
gggaatcggtgtcacttcccttacc

SEQ ID NO: 7700 - DNA, 25 bp, Artificial Sequence
  Synthetic Oligonucleotide
aggagccggtgtaacacttgaaacc

SEQ ID NO: 7701 - DNA, 25 bp, Artificial Sequence
  Synthetic Oligonucleotide
gaaagagtcgttcacgttaggaatc

SEQ ID NO: 7702 - DNA, 25 bp, Artificial Sequence
  Synthetic Oligonucleotide
gacagggagtcgtatgttaagaacc

SEQ ID NO: 7703 - DNA, 25 bp, Artificial Sequence
  Synthetic Oligonucleotide
gacagggtaccctgtcctggagttc

SEQ ID NO: 7704 - DNA, 25 bp, Artificial Sequence
  Synthetic Oligonucleotide
cggtggtgcctctgcctcgtggttc

SEQ ID NO: 7705 - DNA, 25 bp, Artificial Sequence
  Synthetic Oligonucleotide
tggtggtgcttggtctattctgttc

SEQ ID NO: 7706 - DNA, 25 bp, Artificial Sequence
  Synthetic Oligonucleotide
aaggccttgtcttagtcgttgttac

SEQ ID NO: 7707 - DNA, 25 bp, Artificial Sequence
  Synthetic Oligonucleotide
aaggtcgaatgtacttcttagatac

SEQ ID NO: 7708 - DNA, 25 bp, Artificial Sequence
  Synthetic Oligonucleotide
gacagtacgaatatccatctaggtc

SEQ ID NO: 7709 - DNA, 25 bp, Artificial Sequence
  Synthetic Oligonucleotide
gagaacaagatttgctatactattc

SEQ ID NO: 7710 - DNA, 25 bp, Artificial Sequence
  Synthetic Oligonucleotide
aagaaggaagtctgtcgacatttac

SEQ ID NO: 7711 - DNA, 25 bp, Artificial Sequence
  Synthetic Oligonucleotide
aagtagaggttaagcgtccagtttc

SEQ ID NO: 7712 - DNA, 25 bp, Artificial Sequence
  Synthetic Oligonucleotide
ttaagtgaatcgtgtcccatatatc

SEQ ID NO: 7713 - DNA, 25 bp, Artificial Sequence
  Synthetic Oligonucleotide
tacaggagaagtgagacctttcatc

SEQ ID NO: 7714 - DNA, 25 bp, Artificial Sequence
  Synthetic Oligonucleotide
gacgacggaaggaacctacaccatc

SEQ ID NO: 7715 - DNA, 25 bp, Artificial Sequence
  Synthetic Oligonucleotide
gggtcggaagaggtaccaccacttc

SEQ ID NO: 7716 - DNA, 25 bp, Artificial Sequence
  Synthetic Oligonucleotide
gggtcggaagaggtaccagcacttc

SEQ ID NO: 7717 - DNA, 25 bp, Artificial Sequence
  Synthetic Oligonucleotide
gaccagtatcaggtcccgctacatc

SEQ ID NO: 7718 - DNA, 25 bp, Artificial Sequence
  Synthetic Oligonucleotide
ttcaccagtaactcccgttacggtc

SEQ ID NO: 7719 - DNA, 25 bp, Artificial Sequence
  Synthetic Oligonucleotide
actccgtacgacctccatagtcttc

SEQ ID NO: 7720 - DNA, 25 bp, Artificial Sequence
  Synthetic Oligonucleotide
ttttactcggcgacgaccaggcctc

SEQ ID NO: 7721 - DNA, 25 bp, Artificial Sequence
  Synthetic Oligonucleotide
tttagtcacgcaagcttgcgatctc

SEQ ID NO: 7722 - DNA, 25 bp, Artificial Sequence
  Synthetic Oligonucleotide
tgttgggacttgattgacgacggtc

SEQ ID NO: 7723 - DNA, 25 bp, Artificial Sequence
  Synthetic Oligonucleotide
cctggttgtctctgttgagagtgtc

SEQ ID NO: 7724 - DNA, 25 bp, Artificial Sequence
  Synthetic Oligonucleotide
cgatccgttcgcgagatggtgactc

SEQ ID NO: 7725 - DNA, 25 bp, Artificial Sequence
  Synthetic Oligonucleotide
catcggtcacgaggattggtgactc

SEQ ID NO: 7726 - DNA, 25 bp, Artificial Sequence
  Synthetic Oligonucleotide
caactcccacggttttcagagtatc

SEQ ID NO: 7727 - DNA, 25 bp, Artificial Sequence
  Synthetic Oligonucleotide
cttactcacgcaatgttatcaatcc

SEQ ID NO: 7728 - DNA, 25 bp, Artificial Sequence
  Synthetic Oligonucleotide
accgagtgccagattttcaatacct

SEQ ID NO: 7729 - DNA, 25 bp, Artificial Sequence
  Synthetic Oligonucleotide
cggtagaggacgagcttcagatctc

SEQ ID NO: 7730 - DNA, 25 bp, Artificial Sequence
  Synthetic Oligonucleotide
ccgcgtagagggaccgaaagtattc

SEQ ID NO: 7731 - DNA, 25 bp, Artificial Sequence
  Synthetic Oligonucleotide
tcgtgagaaccaaccgaaccctatc

SEQ ID NO: 7732 - DNA, 25 bp, Artificial Sequence
  Synthetic Oligonucleotide
ttcgagatcaaatgcgtccttatac

SEQ ID NO: 7733 - DNA, 25 bp, Artificial Sequence
  Synthetic Oligonucleotide
gagttcgacgaatggtcgtttctac

SEQ ID NO: 7734 - DNA, 25 bp, Artificial Sequence
  Synthetic Oligonucleotide
aaacaggtgcgattagttctttgtc

SEQ ID NO: 7735 - DNA, 25 bp, Artificial Sequence
  Synthetic Oligonucleotide
agtcgatggcggacttcttcgactc

SEQ ID NO: 7736 - DNA, 25 bp, Artificial Sequence
  Synthetic Oligonucleotide
tatggttccgcgaactctcttgagc

SEQ ID NO: 7737 - DNA, 25 bp, Artificial Sequence
  Synthetic Oligonucleotide
ttgcgttgtggtctacctctcaact

SEQ ID NO: 7738 - DNA, 25 bp, Artificial Sequence
  Synthetic Oligonucleotide
tttacgatcgtggtgataaatcatc

SEQ ID NO: 7739 - DNA, 25 bp, Artificial Sequence
  Synthetic Oligonucleotide
tacccgtcgtgtttacatacttgtc

SEQ ID NO: 7740 - DNA, 25 bp, Artificial Sequence
  Synthetic Oligonucleotide
actaagacctcttcacacctacttc

SEQ ID NO: 7741 - DNA, 25 bp, Artificial Sequence
  Synthetic Oligonucleotide
caagtagtctgcaaccacttacttc

SEQ ID NO: 7742 - DNA, 25 bp, Artificial Sequence
  Synthetic Oligonucleotide
aaagttccggctctcgactactgct

SEQ ID NO: 7743 - DNA, 25 bp, Artificial Sequence
  Synthetic Oligonucleotide
aatctatgtcctcgtctactatgtc

SEQ ID NO: 7744 - DNA, 25 bp, Artificial Sequence
  Synthetic Oligonucleotide
aagaactgagttaccgtaacttgtc

SEQ ID NO: 7745 - DNA, 25 bp, Artificial Sequence
  Synthetic Oligonucleotide
aactagacttttggttactttcgtc

SEQ ID NO: 7746 - DNA, 25 bp, Artificial Sequence
  Synthetic Oligonucleotide
tattgcattgttgtgtacgtttacc

SEQ ID NO: 7747 - DNA, 25 bp, Artificial Sequence
  Synthetic Oligonucleotide
tcttacctttttgtcgtagggacat

SEQ ID NO: 7748 - DNA, 25 bp, Artificial Sequence
  Synthetic Oligonucleotide
aatcctaccgttccctgaaggacat

SEQ ID NO: 7749 - DNA, 25 bp, Artificial Sequence
  Synthetic Oligonucleotide
agcccagggttgtcgatacgagaat

SEQ ID NO: 7750 - DNA, 25 bp, Artificial Sequence
  Synthetic Oligonucleotide
tagaccaagatgtttcggaaattat

SEQ ID NO: 7751 - DNA, 25 bp, Artificial Sequence
  Synthetic Oligonucleotide
aagcctagcattttgagacaataat

SEQ ID NO: 7752 - DNA, 25 bp, Artificial Sequence
  Synthetic Oligonucleotide
gtcaaccactgttatggcacaagtt

SEQ ID NO: 7753 - DNA, 25 bp, Artificial Sequence
  Synthetic Oligonucleotide
tatcaatcctgaaagctcgtaattt

SEQ ID NO: 7754 - DNA, 25 bp, Artificial Sequence
  Synthetic Oligonucleotide
accacagcctcgagagttgaagttc

SEQ ID NO: 7755 - DNA, 25 bp, Artificial Sequence
  Synthetic Oligonucleotide
accacagtctcgagaggtggagttc

SEQ ID NO: 7756 - DNA, 25 bp, Artificial Sequence
  Synthetic Oligonucleotide
ccaccacttctctgggagtttgagc

SEQ ID NO: 7757 - DNA, 25 bp, Artificial Sequence
  Synthetic Oligonucleotide
tccaatagatctcagtggtttcggc

SEQ ID NO: 7758 - DNA, 25 bp, Artificial Sequence
  Synthetic Oligonucleotide
cggcagtgttcgcgtggcctcggtc

SEQ ID NO: 7759 - DNA, 25 bp, Artificial Sequence
  Synthetic Oligonucleotide
cggccggaacgtgtacggcctcggc

SEQ ID NO: 7760 - DNA, 25 bp, Artificial Sequence
  Synthetic Oligonucleotide
cgtcccgtccgatctagagcatggc

SEQ ID NO: 7761 - DNA, 25 bp, Artificial Sequence
  Synthetic Oligonucleotide
tcgtcccggcgatgatgcgctggat

SEQ ID NO: 7762 - DNA, 25 bp, Artificial Sequence
  Synthetic Oligonucleotide
tctgtcgtgagatacgtcgcggggc

SEQ ID NO: 7763 - DNA, 25 bp, Artificial Sequence
  Synthetic Oligonucleotide
aaacttctcaactacttggtaagcg

SEQ ID NO: 7764 - DNA, 25 bp, Artificial Sequence
  Synthetic Oligonucleotide
taaaacttcagacacttaaatcgtc

SEQ ID NO: 7765 - DNA, 25 bp, Artificial Sequence
  Synthetic Oligonucleotide
aaaagttaacttcttctaactcgtc

SEQ ID NO: 7766 - DNA, 25 bp, Artificial Sequence
  Synthetic Oligonucleotide
atagcgttaattcgtctgtttagtg

SEQ ID NO: 7767 - DNA, 25 bp, Artificial Sequence
  Synthetic Oligonucleotide
attgccttaattggtctgtttagcg

SEQ ID NO: 7768 - DNA, 25 bp, Artificial Sequence
  Synthetic Oligonucleotide
attgccttaattggtctgtttagcg

SEQ ID NO: 7769 - DNA, 25 bp, Artificial Sequence
  Synthetic Oligonucleotide
attgccttaattggtctgtttagcg

SEQ ID NO: 7770 - DNA, 25 bp, Artificial Sequence
  Synthetic Oligonucleotide
attgccttaattggtctgtttagcg

SEQ ID NO: 7771 - DNA, 25 bp, Artificial Sequence
  Synthetic Oligonucleotide
attgccttaattggtctgtttagcg

SEQ ID NO: 7772 - DNA, 25 bp, Artificial Sequence
  Synthetic Oligonucleotide
tcccgccggcttgtctggtctagtc

SEQ ID NO: 7773 - DNA, 25 bp, Artificial Sequence
  Synthetic Oligonucleotide
atcgaaggctctagtctgctctagc

SEQ ID NO: 7774 - DNA, 25 bp, Artificial Sequence
  Synthetic Oligonucleotide
gatcgaatagatgttcgatcgttgc

SEQ ID NO: 7775 - DNA, 25 bp, Artificial Sequence
  Synthetic Oligonucleotide
ggaccaagaggttttacaggtgtgc

SEQ ID NO: 7776 - DNA, 25 bp, Artificial Sequence
  Synthetic Oligonucleotide
gaacatcgggactataacaggttcc

SEQ ID NO: 7777 - DNA, 25 bp, Artificial Sequence
  Synthetic Oligonucleotide
gtggagatcgaagtttgaggcttcc

SEQ ID NO: 7778 - DNA, 25 bp, Artificial Sequence
  Synthetic Oligonucleotide
aacgactgaaatacgcggccttccg

SEQ ID NO: 7779 - DNA, 25 bp, Artificial Sequence
  Synthetic Oligonucleotide
acgtaccgaattagaaactctgttc

SEQ ID NO: 7780 - DNA, 25 bp, Artificial Sequence
  Synthetic Oligonucleotide
accgtccaggtatgcgattctttcc

SEQ ID NO: 7781 - DNA, 25 bp, Artificial Sequence
  Synthetic Oligonucleotide
cgtcgaaggtaaggatacttccttc

SEQ ID NO: 7782 - DNA, 25 bp, Artificial Sequence
  Synthetic Oligonucleotide
aggcaagtggtagagtcttcctatc

SEQ ID NO: 7783 - DNA, 25 bp, Artificial Sequence
  Synthetic Oligonucleotide
ggtgataggatggtagctttcaact

SEQ ID NO: 7784 - DNA, 25 bp, Artificial Sequence
  Synthetic Oligonucleotide
gggcaagagtcggaactgccacggt

SEQ ID NO: 7785 - DNA, 25 bp, Artificial Sequence
  Synthetic Oligonucleotide
ctgggacgaatcgaaggctctagtc

SEQ ID NO: 7786 - DNA, 25 bp, Artificial Sequence
  Synthetic Oligonucleotide
cgggacctagtccactagcggtttc

SEQ ID NO: 7787 - DNA, 25 bp, Artificial Sequence
  Synthetic Oligonucleotide
tggaagtaccttctacctcggtttc

SEQ ID NO: 7788 - DNA, 25 bp, Artificial Sequence
  Synthetic Oligonucleotide
gaagagtccttctctctctgttctc

SEQ ID NO: 7789 - DNA, 25 bp, Artificial Sequence
  Synthetic Oligonucleotide
agaggagaattgtcggtctgatcgc

SEQ ID NO: 7790 - DNA, 25 bp, Artificial Sequence
  Synthetic Oligonucleotide
gatgaaattggaagtacgacgatcc

SEQ ID NO: 7791 - DNA, 25 bp, Artificial Sequence
  Synthetic Oligonucleotide
gaaatacaggtgtctaaagatactc

SEQ ID NO: 7792 - DNA, 25 bp, Artificial Sequence
  Synthetic Oligonucleotide
aagaacccaggcttcttaatcttcg

SEQ ID NO: 7793 - DNA, 25 bp, Artificial Sequence
  Synthetic Oligonucleotide
acccacagcgacaacttcagtctcc

SEQ ID NO: 7794 - DNA, 25 bp, Artificial Sequence
  Synthetic Oligonucleotide
acggcgacggcagaagtctgtcctc

SEQ ID NO: 7795 - DNA, 25 bp, Artificial Sequence
  Synthetic Oligonucleotide
taggaggtcgacgaacggtcgtttc

SEQ ID NO: 7796 - DNA, 25 bp, Artificial Sequence
  Synthetic Oligonucleotide
tctggggtcacctgaggtgttgtat

SEQ ID NO: 7797 - DNA, 25 bp, Artificial Sequence
  Synthetic Oligonucleotide
atttgtgtcacctggttgtctctgt

SEQ ID NO: 7798 - DNA, 25 bp, Artificial Sequence
  Synthetic Oligonucleotide
tgtttctgtcagtccgttgctgtct

SEQ ID NO: 7799 - DNA, 25 bp, Artificial Sequence
  Synthetic Oligonucleotide
ttgtttctgtcagtccgttgctgtc

SEQ ID NO: 7800 - DNA, 25 bp, Artificial Sequence
  Synthetic Oligonucleotide
attctagtgcaggtcggttcagttc

SEQ ID NO: 7801 - DNA, 25 bp, Artificial Sequence
  Synthetic Oligonucleotide
cataacatgcaggtccgtggcggtc

SEQ ID NO: 7802 - DNA, 25 bp, Artificial Sequence
  Synthetic Oligonucleotide
catccgtaggaaaaccgggtacggc

SEQ ID NO: 7803 - DNA, 25 bp, Artificial Sequence
  Synthetic Oligonucleotide
ccacctgaggaagacctacaacatc

SEQ ID NO: 7804 - DNA, 25 bp, Artificial Sequence
  Synthetic Oligonucleotide
catacctggtaaacccaaaaagtag

SEQ ID NO: 7805 - DNA, 25 bp, Artificial Sequence
  Synthetic Oligonucleotide
ccatcgtaaagactctacaaaaagg

SEQ ID NO: 7806 - DNA, 25 bp, Artificial Sequence
  Synthetic Oligonucleotide
gccgtcaaacgacgcctaaatcggg

SEQ ID NO: 7807 - DNA, 25 bp, Artificial Sequence
  Synthetic Oligonucleotide
tctaccaagtaacctacaaatggtg

SEQ ID NO: 7808 - DNA, 25 bp, Artificial Sequence
  Synthetic Oligonucleotide
gtacaccaacgacccaaacttgagc

SEQ ID NO: 7809 - DNA, 25 bp, Artificial Sequence
  Synthetic Oligonucleotide
gtctagcggcggcgaaacctacggc

SEQ ID NO: 7810 - DNA, 25 bp, Artificial Sequence
  Synthetic Oligonucleotide
tcgtagcggggtaaactaaaaccgc

SEQ ID NO: 7811 - DNA, 25 bp, Artificial Sequence
  Synthetic Oligonucleotide
cctcgaaggggtagagaatcctagc

SEQ ID NO: 7812 - DNA, 25 bp, Artificial Sequence
  Synthetic Oligonucleotide
ccgaagtagttgttgctcaagcggg

SEQ ID NO: 7813 - DNA, 25 bp, Artificial Sequence
  Synthetic Oligonucleotide
cgaatagttgatctagccgcgtcgc

SEQ ID NO: 7814 - DNA, 25 bp, Artificial Sequence
  Synthetic Oligonucleotide
acgaaatcagcaagttcgacgcgcc

SEQ ID NO: 7815 - DNA, 25 bp, Artificial Sequence
  Synthetic Oligonucleotide
acgggatcaacaattctacgttccg

SEQ ID NO: 7816 - DNA, 25 bp, Artificial Sequence
  Synthetic Oligonucleotide
gatgaaaaacacagtcactattcct

SEQ ID NO: 7817 - DNA, 25 bp, Artificial Sequence
  Synthetic Oligonucleotide
atgacacccacgtagaacatctctc

SEQ ID NO: 7818 - DNA, 25 bp, Artificial Sequence
  Synthetic Oligonucleotide
aggacttgccatcgtagaactgctg

SEQ ID NO: 7819 - DNA, 25 bp, Artificial Sequence
  Synthetic Oligonucleotide
cagcagttctacgatggcaagtcct

SEQ ID NO: 7820 - DNA, 25 bp, Artificial Sequence
  Synthetic Oligonucleotide
gtgcgtctgcgtactggttcacttc

SEQ ID NO: 7821 - DNA, 25 bp, Artificial Sequence
  Synthetic Oligonucleotide
gggactcggactggtgttccacctc

SEQ ID NO: 7822 - DNA, 25 bp, Artificial Sequence
  Synthetic Oligonucleotide
gggactcggactggtgttccacctc

SEQ ID NO: 7823 - DNA, 25 bp, Artificial Sequence
  Synthetic Oligonucleotide
accagatggctggtatctacccttc

SEQ ID NO: 7824 - DNA, 25 bp, Artificial Sequence
  Synthetic Oligonucleotide
gtaccgaatcggtccttgaccttcc

SEQ ID NO: 7825 - DNA, 25 bp, Artificial Sequence
  Synthetic Oligonucleotide
gggaatcggtgtgacttcccttacc

SEQ ID NO: 7826 - DNA, 25 bp, Artificial Sequence
  Synthetic Oligonucleotide
aggagccggtgttacacttgaaacc

SEQ ID NO: 7827 - DNA, 25 bp, Artificial Sequence
  Synthetic Oligonucleotide
gaaagagtcgttgacgttaggaatc

SEQ ID NO: 7828 - DNA, 25 bp, Artificial Sequence
  Synthetic Oligonucleotide
gacagggagtcgaatgttaagaacc

SEQ ID NO: 7829 - DNA, 25 bp, Artificial Sequence
  Synthetic Oligonucleotide
gacagggtacccagtcctggagttc

SEQ ID NO: 7830 - DNA, 25 bp, Artificial Sequence
  Synthetic Oligonucleotide
cggtggtgcctcagcctcgtggttc

SEQ ID NO: 7831 - DNA, 25 bp, Artificial Sequence
  Synthetic Oligonucleotide
tggtggtgcttgctctattctgttc

SEQ ID NO: 7832 - DNA, 25 bp, Artificial Sequence
  Synthetic Oligonucleotide
aaggccttgtctaagtcgttgttac

SEQ ID NO: 7833 - DNA, 25 bp, Artificial Sequence
  Synthetic Oligonucleotide
aaggtcgaatgttcttcttagatac

SEQ ID NO: 7834 - DNA, 25 bp, Artificial Sequence
  Synthetic Oligonucleotide
gacagtacgaatttccatctaggtc

SEQ ID NO: 7835 - DNA, 25 bp, Artificial Sequence
  Synthetic Oligonucleotide
gagaacaagattagctatactattc

SEQ ID NO: 7836 - DNA, 25 bp, Artificial Sequence
  Synthetic Oligonucleotide
aagaaggaagtcagtcgacatttac

SEQ ID NO: 7837 - DNA, 25 bp, Artificial Sequence
  Synthetic Oligonucleotide
aagtagaggttatgcgtccagtttc

SEQ ID NO: 7838 - DNA, 25 bp, Artificial Sequence
  Synthetic Oligonucleotide
ttaagtgaatcgagtcccatatatc

SEQ ID NO: 7839 - DNA, 25 bp, Artificial Sequence
  Synthetic Oligonucleotide
tacaggagaagtcagacctttcatc

SEQ ID NO: 7840 - DNA, 25 bp, Artificial Sequence
  Synthetic Oligonucleotide
gacgacggaaggtacctacaccatc

SEQ ID NO: 7841 - DNA, 25 bp, Artificial Sequence
  Synthetic Oligonucleotide
gggtcggaagagctaccaccacttc

SEQ ID NO: 7842 - DNA, 25 bp, Artificial Sequence
  Synthetic Oligonucleotide
gggtcggaagagctaccagcacttc

SEQ ID NO: 7843 - DNA, 25 bp, Artificial Sequence
  Synthetic Oligonucleotide
gaccagtatcagctcccgctacatc

SEQ ID NO: 7844 - DNA, 25 bp, Artificial Sequence
  Synthetic Oligonucleotide
ttcaccagtaacacccgttacggtc

SEQ ID NO: 7845 - DNA, 25 bp, Artificial Sequence
  Synthetic Oligonucleotide
actccgtacgacgtccatagtcttc

SEQ ID NO: 7846 - DNA, 25 bp, Artificial Sequence
  Synthetic Oligonucleotide
ttttactcggcgtcgaccaggcctc

SEQ ID NO: 7847 - DNA, 25 bp, Artificial Sequence
  Synthetic Oligonucleotide
tttagtcacgcatgcttgcgatctc

SEQ ID NO: 7848 - DNA, 25 bp, Artificial Sequence
  Synthetic Oligonucleotide
tgttgggacttgtttgacgacggtc

SEQ ID NO: 7849 - DNA, 25 bp, Artificial Sequence
  Synthetic Oligonucleotide
cctggttgtctcagttgagagtgtc

SEQ ID NO: 7850 - DNA, 25 bp, Artificial Sequence
  Synthetic Oligonucleotide
cgatccgttcgccagatggtgactc

SEQ ID NO: 7851 - DNA, 25 bp, Artificial Sequence
  Synthetic Oligonucleotide
catcggtcacgacgattggtgactc

SEQ ID NO: 7852 - DNA, 25 bp, Artificial Sequence
  Synthetic Oligonucleotide
caactcccacggatttcagagtatc

SEQ ID NO: 7853 - DNA, 25 bp, Artificial Sequence
  Synthetic Oligonucleotide
cttactcacgcattgttatcaatcc

SEQ ID NO: 7854 - DNA, 25 bp, Artificial Sequence
  Synthetic Oligonucleotide
accgagtgccagtttttcaatacct

SEQ ID NO: 7855 - DNA, 25 bp, Artificial Sequence
  Synthetic Oligonucleotide
cggtagaggacgtgcttcagatctc

SEQ ID NO: 7856 - DNA, 25 bp, Artificial Sequence
  Synthetic Oligonucleotide
ccgcgtagagggtccgaaagtattc

SEQ ID NO: 7857 - DNA, 25 bp, Artificial Sequence
  Synthetic Oligonucleotide
tcgtgagaaccatccgaaccctatc

SEQ ID NO: 7858 - DNA, 25 bp, Artificial Sequence
  Synthetic Oligonucleotide
ttcgagatcaaaagcgtccttatac

SEQ ID NO: 7859 - DNA, 25 bp, Artificial Sequence
  Synthetic Oligonucleotide
gagttcgacgaaaggtcgtttctac

SEQ ID NO: 7860 - DNA, 25 bp, Artificial Sequence
  Synthetic Oligonucleotide
aaacaggtgcgaatagttctttgtc

SEQ ID NO: 7861 - DNA, 25 bp, Artificial Sequence
  Synthetic Oligonucleotide
agtcgatggcggtcttcttcgactc

SEQ ID NO: 7862 - DNA, 25 bp, Artificial Sequence
  Synthetic Oligonucleotide
tatggttccgcgtactctcttgagc

SEQ ID NO: 7863 - DNA, 25 bp, Artificial Sequence
  Synthetic Oligonucleotide
ttgcgttgtggtgtacctctcaact

SEQ ID NO: 7864 - DNA, 25 bp, Artificial Sequence
  Synthetic Oligonucleotide
tttacgatcgtgctgataaatcatc

SEQ ID NO: 7865 - DNA, 25 bp, Artificial Sequence
  Synthetic Oligonucleotide
tacccgtcgtgtatacatacttgtc

SEQ ID NO: 7866 - DNA, 25 bp, Artificial Sequence
  Synthetic Oligonucleotide
actaagacctctacacacctacttc

SEQ ID NO: 7867 - DNA, 25 bp, Artificial Sequence
  Synthetic Oligonucleotide
caagtagtctgctaccacttacttc

SEQ ID NO: 7868 - DNA, 25 bp, Artificial Sequence
  Synthetic Oligonucleotide
aaagttccggctgtcgactactgct

SEQ ID NO: 7869 - DNA, 25 bp, Artificial Sequence
  Synthetic Oligonucleotide
aatctatgtcctggtctactatgtc

SEQ ID NO: 7870 - DNA, 25 bp, Artificial Sequence
  Synthetic Oligonucleotide
aagaactgagtttccgtaacttgtc

SEQ ID NO: 7871 - DNA, 25 bp, Artificial Sequence
  Synthetic Oligonucleotide
aactagacttttcgttactttcgtc

SEQ ID NO: 7872 - DNA, 25 bp, Artificial Sequence
  Synthetic Oligonucleotide
tattgcattgttctgtacgtttacc

SEQ ID NO: 7873 - DNA, 25 bp, Artificial Sequence
  Synthetic Oligonucleotide
tcttacctttttctcgtagggacat

SEQ ID NO: 7874 - DNA, 25 bp, Artificial Sequence
  Synthetic Oligonucleotide
aatcctaccgttgcctgaaggacat

SEQ ID NO: 7875 - DNA, 25 bp, Artificial Sequence
  Synthetic Oligonucleotide
agcccagggttgacgatacgagaat

SEQ ID NO: 7876 - DNA, 25 bp, Artificial Sequence
  Synthetic Oligonucleotide
tagaccaagatgattcggaaattat

SEQ ID NO: 7877 - DNA, 25 bp, Artificial Sequence
  Synthetic Oligonucleotide
aagcctagcattatgagacaataat

SEQ ID NO: 7878 - DNA, 25 bp, Artificial Sequence
  Synthetic Oligonucleotide
gtcaaccactgtaatggcacaagtt

SEQ ID NO: 7879 - DNA, 25 bp, Artificial Sequence
  Synthetic Oligonucleotide
tatcaatcctgatagctcgtaattt

SEQ ID NO: 7880 - DNA, 25 bp, Artificial Sequence
  Synthetic Oligonucleotide
accacagcctcgtgagttgaagttc

SEQ ID NO: 7881 - DNA, 25 bp, Artificial Sequence
  Synthetic Oligonucleotide
accacagtctcgtgaggtggagttc

SEQ ID NO: 7882 - DNA, 25 bp, Artificial Sequence
  Synthetic Oligonucleotide
ccaccacttctcagggagtttgagc

SEQ ID NO: 7883 - DNA, 25 bp, Artificial Sequence
  Synthetic Oligonucleotide
tccaatagatctgagtggtttcggc

SEQ ID NO: 7884 - DNA, 25 bp, Artificial Sequence
  Synthetic Oligonucleotide
cggcagtgttcgggtggcctcggtc

SEQ ID NO: 7885 - DNA, 25 bp, Artificial Sequence
  Synthetic Oligonucleotide
cggccggaacgtctacggcctcggc

SEQ ID NO: 7886 - DNA, 25 bp, Artificial Sequence
  Synthetic Oligonucleotide
cgtcccgtccgaactagagcatggc

SEQ ID NO: 7887 - DNA, 25 bp, Artificial Sequence
  Synthetic Oligonucleotide
tcgtcccggcgaagatgcgctggat

SEQ ID NO: 7888 - DNA, 25 bp, Artificial Sequence
  Synthetic Oligonucleotide
tctgtcgtgagaaacgtcgcggggc

SEQ ID NO: 7889 - DNA, 25 bp, Artificial Sequence
  Synthetic Oligonucleotide
aaacttctcaacaacttggtaagcg

SEQ ID NO: 7890 - DNA, 25 bp, Artificial Sequence
  Synthetic Oligonucleotide
taaaacttcagagacttaaatcgtc

SEQ ID NO: 7891 - DNA, 25 bp, Artificial Sequence
  Synthetic Oligonucleotide
aaaagttaacttgttctaactcgtc

SEQ ID NO: 7892 - DNA, 25 bp, Artificial Sequence
  Synthetic Oligonucleotide
atagcgttaattggtctgtttagtg

SEQ ID NO: 7893 - DNA, 25 bp, Artificial Sequence
  Synthetic Oligonucleotide
attgccttaattcgtctgtttagcg

SEQ ID NO: 7894 - DNA, 25 bp, Artificial Sequence
  Synthetic Oligonucleotide
attgccttaattcgtctgtttagcg

SEQ ID NO: 7895 - DNA, 25 bp, Artificial Sequence
  Synthetic Oligonucleotide
attgccttaattcgtctgtttagcg

SEQ ID NO: 7896 - DNA, 25 bp, Artificial Sequence
  Synthetic Oligonucleotide
attgccttaattcgtctgtttagcg

SEQ ID NO: 7897 - DNA, 25 bp, Artificial Sequence
  Synthetic Oligonucleotide
attgccttaattcgtctgtttagcg

SEQ ID NO: 7898 - DNA, 25 bp, Artificial Sequence
  Synthetic Oligonucleotide
tcccgccggcttctctggtctagtc

SEQ ID NO: 7899 - DNA, 25 bp, Artificial Sequence
  Synthetic Oligonucleotide
atcgaaggctcttgtctgctctagc

SEQ ID NO: 7900 - DNA, 25 bp, Artificial Sequence
  Synthetic Oligonucleotide
gatcgaatagatcttcgatcgttgc

SEQ ID NO: 7901 - DNA, 25 bp, Artificial Sequence
  Synthetic Oligonucleotide
ggaccaagaggtattacaggtgtgc

SEQ ID NO: 7902 - DNA, 25 bp, Artificial Sequence
  Synthetic Oligonucleotide
gaacatcgggacaataacaggttcc

SEQ ID NO: 7903 - DNA, 25 bp, Artificial Sequence
  Synthetic Oligonucleotide
gtggagatcgaactttgaggcttcc

SEQ ID NO: 7904 - DNA, 25 bp, Artificial Sequence
  Synthetic Oligonucleotide
aacgactgaaattcgcggccttccg

SEQ ID NO: 7905 - DNA, 25 bp, Artificial Sequence
  Synthetic Oligonucleotide
acgtaccgaatttgaaactctgttc

SEQ ID NO: 7906 - DNA, 25 bp, Artificial Sequence
  Synthetic Oligonucleotide
accgtccaggtaagcgattctttcc

SEQ ID NO: 7907 - DNA, 25 bp, Artificial Sequence
  Synthetic Oligonucleotide
cgtcgaaggtaacgatacttccttc

SEQ ID NO: 7908 - DNA, 25 bp, Artificial Sequence
  Synthetic Oligonucleotide
aggcaagtggtacagtcttcctatc

SEQ ID NO: 7909 - DNA, 25 bp, Artificial Sequence
  Synthetic Oligonucleotide
ggtgataggatgctagctttcaact

SEQ ID NO: 7910 - DNA, 25 bp, Artificial Sequence
  Synthetic Oligonucleotide
gggcaagagtcgcaactgccacggt

SEQ ID NO: 7911 - DNA, 25 bp, Artificial Sequence
  Synthetic Oligonucleotide
ctgggacgaatccaaggctctagtc

SEQ ID NO: 7912 - DNA, 25 bp, Artificial Sequence
  Synthetic Oligonucleotide
cgggacctagtcgactagcggtttc

SEQ ID NO: 7913 - DNA, 25 bp, Artificial Sequence
  Synthetic Oligonucleotide
tggaagtaccttgtacctcggtttc

SEQ ID NO: 7914 - DNA, 25 bp, Artificial Sequence
  Synthetic Oligonucleotide
gaagagtccttcactctctgttctc

SEQ ID NO: 7915 - DNA, 25 bp, Artificial Sequence
  Synthetic Oligonucleotide
agaggagaattgacggtctgatcgc

SEQ ID NO: 7916 - DNA, 25 bp, Artificial Sequence
  Synthetic Oligonucleotide
gatgaaattggatgtacgacgatcc

SEQ ID NO: 7917 - DNA, 25 bp, Artificial Sequence
  Synthetic Oligonucleotide
gaaatacaggtgactaaagatactc

SEQ ID NO: 7918 - DNA, 25 bp, Artificial Sequence
  Synthetic Oligonucleotide
aagaacccaggcatcttaatcttcg

SEQ ID NO: 7919 - DNA, 25 bp, Artificial Sequence
  Synthetic Oligonucleotide
acccacagcgactacttcagtctcc

SEQ ID NO: 7920 - DNA, 25 bp, Artificial Sequence
  Synthetic Oligonucleotide
acggcgacggcacaagtctgtcctc

SEQ ID NO: 7921 - DNA, 25 bp, Artificial Sequence
  Synthetic Oligonucleotide
taggaggtcgaccaacggtcgtttc

SEQ ID NO: 7922 - DNA, 25 bp, Artificial Sequence
  Synthetic Oligonucleotide
tctggggtcaccagaggtgttgtat

SEQ ID NO: 7923 - DNA, 25 bp, Artificial Sequence
  Synthetic Oligonucleotide
atttgtgtcaccaggttgtctctgt

SEQ ID NO: 7924 - DNA, 25 bp, Artificial Sequence
  Synthetic Oligonucleotide
tgtttctgtcagaccgttgctgtct

SEQ ID NO: 7925 - DNA, 25 bp, Artificial Sequence
  Synthetic Oligonucleotide
ttgtttctgtcactccgttgctgtc

SEQ ID NO: 7926 - DNA, 25 bp, Artificial Sequence
  Synthetic Oligonucleotide
attctagtgcagctcggttcagttc

SEQ ID NO: 7927 - DNA, 25 bp, Artificial Sequence
  Synthetic Oligonucleotide
cataacatgcagctccgtggcggtc

SEQ ID NO: 7928 - DNA, 25 bp, Artificial Sequence
  Synthetic Oligonucleotide
catccgtaggaataccgggtacggc

SEQ ID NO: 7929 - DNA, 25 bp, Artificial Sequence
  Synthetic Oligonucleotide
ccacctgaggaacacctacaacatc

SEQ ID NO: 7930 - DNA, 25 bp, Artificial Sequence
  Synthetic Oligonucleotide
catacctggtaatcccaaaaagtag

SEQ ID NO: 7931 - DNA, 25 bp, Artificial Sequence
  Synthetic Oligonucleotide
ccatcgtaaagagtctacaaaaagg

SEQ ID NO: 7932 - DNA, 25 bp, Artificial Sequence
  Synthetic Oligonucleotide
gccgtcaaacgaggcctaaatcggg

SEQ ID NO: 7933 - DNA, 25 bp, Artificial Sequence
  Synthetic Oligonucleotide
tctaccaagtaagctacaaatggtg

SEQ ID NO: 7934 - DNA, 25 bp, Artificial Sequence
  Synthetic Oligonucleotide
gtacaccaacgagccaaacttgagc

SEQ ID NO: 7935 - DNA, 25 bp, Artificial Sequence
  Synthetic Oligonucleotide
gtctagcggcggggaaacctacggc

SEQ ID NO: 7936 - DNA, 25 bp, Artificial Sequence
  Synthetic Oligonucleotide
tcgtagcggggttaactaaaaccgc

SEQ ID NO: 7937 - DNA, 25 bp, Artificial Sequence
  Synthetic Oligonucleotide
cctcgaaggggttgagaatcctagc

SEQ ID NO: 7938 - DNA, 25 bp, Artificial Sequence
  Synthetic Oligonucleotide
ccgaagtagttgatgctcaagcggg

SEQ ID NO: 7939 - DNA, 25 bp, Artificial Sequence
  Synthetic Oligonucleotide
cgaatagttgatgtagccgcgtcgc

SEQ ID NO: 7940 - DNA, 25 bp, Artificial Sequence
  Synthetic Oligonucleotide
acgaaatcagcatgttcgacgcgcc

SEQ ID NO: 7941 - DNA, 25 bp, Artificial Sequence
  Synthetic Oligonucleotide
acgggatcaacatttctacgttccg

SEQ ID NO: 7942 - DNA, 25 bp, Artificial Sequence
  Synthetic Oligonucleotide
gatgaaaaacactgtcactattcct

SEQ ID NO: 7943 - DNA, 25 bp, Artificial Sequence
  Synthetic Oligonucleotide
atgacacccacgaagaacatctctc

SEQ ID NO: 7944 - DNA, 25 bp, Artificial Sequence
  Synthetic Oligonucleotide
cagcagttctacgatggcaagtcct

SEQ ID NO: 7945 - DNA, 25 bp, Artificial Sequence
  Synthetic Oligonucleotide
aggacttgccatcgtagaactgctg

SEQ ID NO: 7946 - DNA, 25 bp, Artificial Sequence
  Synthetic Oligonucleotide
gtacggcctcggcaacagctgctgc

SEQ ID NO: 7947 - DNA, 25 bp, Artificial Sequence
  Synthetic Oligonucleotide
tagagtccagggtataatcgctcgc

SEQ ID NO: 7948 - DNA, 25 bp, Artificial Sequence
  Synthetic Oligonucleotide
gtatggtcaaggtaatagcgtctgc

SEQ ID NO: 7949 - DNA, 25 bp, Artificial Sequence
  Synthetic Oligonucleotide
gactgaaagttatctagcgtcgctc

SEQ ID NO: 7950 - DNA, 25 bp, Artificial Sequence
  Synthetic Oligonucleotide
aatgacaacgcattaggtcgacgtc

SEQ ID NO: 7951 - DNA, 25 bp, Artificial Sequence
  Synthetic Oligonucleotide
gtattgactaaattactcggtaagc

SEQ ID NO: 7952 - DNA, 25 bp, Artificial Sequence
  Synthetic Oligonucleotide
gacgttgactctttatgtccatctc

SEQ ID NO: 7953 - DNA, 25 bp, Artificial Sequence
  Synthetic Oligonucleotide
ggtaggactatttacctgtcatgtc

SEQ ID NO: 7954 - DNA, 25 bp, Artificial Sequence
  Synthetic Oligonucleotide
agtggagtgtacttactcttaattc

SEQ ID NO: 7955 - DNA, 25 bp, Artificial Sequence
  Synthetic Oligonucleotide
gagtagcacgcttagcattatgttc

SEQ ID NO: 7956 - DNA, 25 bp, Artificial Sequence
  Synthetic Oligonucleotide
gttggtaccatcaggatctatgatg

SEQ ID NO: 7957 - DNA, 25 bp, Artificial Sequence
  Synthetic Oligonucleotide
agtggtaccatccgtgccgctgatg

SEQ ID NO: 7958 - DNA, 25 bp, Artificial Sequence
  Synthetic Oligonucleotide
agcggtaccgaatcggaccttgacc

SEQ ID NO: 7959 - DNA, 25 bp, Artificial Sequence
  Synthetic Oligonucleotide
aggagagaagtaccgaccttgactc

SEQ ID NO: 7960 - DNA, 25 bp, Artificial Sequence
  Synthetic Oligonucleotide
tacagagaagtgttacagtttgatc

SEQ ID NO: 7961 - DNA, 25 bp, Artificial Sequence
  Synthetic Oligonucleotide
tagaaatacttggacgttcgagatc

SEQ ID NO: 7962 - DNA, 25 bp, Artificial Sequence
  Synthetic Oligonucleotide
tactaaagttatggacatagtcatc

SEQ ID NO: 7963 - DNA, 25 bp, Artificial Sequence
  Synthetic Oligonucleotide
actcgaagtgttacaacagtaactc

SEQ ID NO: 7964 - DNA, 25 bp, Artificial Sequence
  Synthetic Oligonucleotide
gctttggatgcacgaacggtagatc

SEQ ID NO: 7965 - DNA, 25 bp, Artificial Sequence
  Synthetic Oligonucleotide
tcaatgtcgagtcacgtggtacttc

SEQ ID NO: 7966 - DNA, 25 bp, Artificial Sequence
  Synthetic Oligonucleotide
tacgtgtacgacactcgagctactc

SEQ ID NO: 7967 - DNA, 25 bp, Artificial Sequence
  Synthetic Oligonucleotide
ctttctcagagacgtcgaggtactc

SEQ ID NO: 7968 - DNA, 25 bp, Artificial Sequence
  Synthetic Oligonucleotide
tctaaaaaagtgacgacgtagtatc

SEQ ID NO: 7969 - DNA, 25 bp, Artificial Sequence
  Synthetic Oligonucleotide
gtccaaagaggtccgccgtacagtc

SEQ ID NO: 7970 - DNA, 25 bp, Artificial Sequence
  Synthetic Oligonucleotide
tcacctcagtatgaccttgtacatc

SEQ ID NO: 7971 - DNA, 25 bp, Artificial Sequence
  Synthetic Oligonucleotide
ccatctcagtatgaccttgtacatc

SEQ ID NO: 7972 - DNA, 25 bp, Artificial Sequence
  Synthetic Oligonucleotide
tccctccggagtgactgggacgacc

SEQ ID NO: 7973 - DNA, 25 bp, Artificial Sequence
  Synthetic Oligonucleotide
ctcacttcccttacagtgaggactc

SEQ ID NO: 7974 - DNA, 25 bp, Artificial Sequence
  Synthetic Oligonucleotide
ccgtatgtccctgttgtgtcggacc

SEQ ID NO: 7975 - DNA, 25 bp, Artificial Sequence
  Synthetic Oligonucleotide
actactgtcgtcgttttgcgaaccc

SEQ ID NO: 7976 - DNA, 25 bp, Artificial Sequence
  Synthetic Oligonucleotide
aattcgcttcagtctgtgaacgacc

SEQ ID NO: 7977 - DNA, 25 bp, Artificial Sequence
  Synthetic Oligonucleotide
gattggtcgcagacctgttgtaccg

SEQ ID NO: 7978 - DNA, 25 bp, Artificial Sequence
  Synthetic Oligonucleotide
ttggtaccggtgactcgatagtatc

SEQ ID NO: 7979 - DNA, 25 bp, Artificial Sequence
  Synthetic Oligonucleotide
cttgggtcccggaacgcgaacgatc

SEQ ID NO: 7980 - DNA, 25 bp, Artificial Sequence
  Synthetic Oligonucleotide
ttcgggtcatcgtccgtcgaatccg

SEQ ID NO: 7981 - DNA, 25 bp, Artificial Sequence
  Synthetic Oligonucleotide
tggcacgagttaacccatgaactcc

SEQ ID NO: 7982 - DNA, 25 bp, Artificial Sequence
  Synthetic Oligonucleotide
attccgagcggtacccacggggtcc

SEQ ID NO: 7983 - DNA, 25 bp, Artificial Sequence
  Synthetic Oligonucleotide
tattggacgaagactccggggtgcc

SEQ ID NO: 7984 - DNA, 25 bp, Artificial Sequence
  Synthetic Oligonucleotide
tccgaaacactttcggcggtcgctc

SEQ ID NO: 7985 - DNA, 25 bp, Artificial Sequence
  Synthetic Oligonucleotide
ccttcgattccttggagctctgctc

SEQ ID NO: 7986 - DNA, 25 bp, Artificial Sequence
  Synthetic Oligonucleotide
tactatgtcttctaagctcttcgtc

SEQ ID NO: 7987 - DNA, 25 bp, Artificial Sequence
  Synthetic Oligonucleotide
tcgtcgttggtaggtactcttcgtc

SEQ ID NO: 7988 - DNA, 25 bp, Artificial Sequence
  Synthetic Oligonucleotide
cctatcgtgtcggacctatcgttgc

SEQ ID NO: 7989 - DNA, 25 bp, Artificial Sequence
  Synthetic Oligonucleotide
ctcccgtatggggagcatctacccg

SEQ ID NO: 7990 - DNA, 25 bp, Artificial Sequence
  Synthetic Oligonucleotide
ttccgtcttgggaacattacgtcgc

SEQ ID NO: 7991 - DNA, 25 bp, Artificial Sequence
  Synthetic Oligonucleotide
ttaagcgtgcggcttactactttgc

SEQ ID NO: 7992 - DNA, 25 bp, Artificial Sequence
  Synthetic Oligonucleotide
tcaatcgtacggtctcagagcaagc

SEQ ID NO: 7993 - DNA, 25 bp, Artificial Sequence
  Synthetic Oligonucleotide
aaagcgtggagtcacagtcatagtc

SEQ ID NO: 7994 - DNA, 25 bp, Artificial Sequence
  Synthetic Oligonucleotide
aataatctgctgctgtaggtatatc

SEQ ID NO: 7995 - DNA, 25 bp, Artificial Sequence
  Synthetic Oligonucleotide
ttttacgtctgtcgtgagatacgtc

SEQ ID NO: 7996 - DNA, 25 bp, Artificial Sequence
  Synthetic Oligonucleotide
agtttagttgtagtacgactacatc

SEQ ID NO: 7997 - DNA, 25 bp, Artificial Sequence
  Synthetic Oligonucleotide
gtcgacttttgaactacacttactc

SEQ ID NO: 7998 - DNA, 25 bp, Artificial Sequence
  Synthetic Oligonucleotide
ggtcgtagtttccatcttctcactc

SEQ ID NO: 7999 - DNA, 25 bp, Artificial Sequence
  Synthetic Oligonucleotide
aagtgttcgttttttcatctgagtc

SEQ ID NO: 8000 - DNA, 25 bp, Artificial Sequence
  Synthetic Oligonucleotide
aacgagtttcccttctccagggacc

SEQ ID NO: 8001 - DNA, 25 bp, Artificial Sequence
  Synthetic Oligonucleotide
gcggctttctggttcccaaggacgc

SEQ ID NO: 8002 - DNA, 25 bp, Artificial Sequence
  Synthetic Oligonucleotide
gcatgtctagcgtttcccacgggtc

SEQ ID NO: 8003 - DNA, 25 bp, Artificial Sequence
  Synthetic Oligonucleotide
agctactgcgggagcccaaggtacg

SEQ ID NO: 8004 - DNA, 25 bp, Artificial Sequence
  Synthetic Oligonucleotide
agaaagcggcgtctctgcagaggtt

SEQ ID NO: 8005 - DNA, 25 bp, Artificial Sequence
  Synthetic Oligonucleotide
aacacccgcgtcccttgacttgggt

SEQ ID NO: 8006 - DNA, 25 bp, Artificial Sequence
  Synthetic Oligonucleotide
aaaacagaccacaccattcaggggt

SEQ ID NO: 8007 - DNA, 25 bp, Artificial Sequence
  Synthetic Oligonucleotide
aattagaaccctctattgtcaaggg

SEQ ID NO: 8008 - DNA, 25 bp, Artificial Sequence
  Synthetic Oligonucleotide
cggaagcctcccttagtcacagggt

SEQ ID NO: 8009 - DNA, 25 bp, Artificial Sequence
  Synthetic Oligonucleotide
tgcgataacctcgaccttaatggcg

SEQ ID NO: 8010 - DNA, 25 bp, Artificial Sequence
  Synthetic Oligonucleotide
ttgacaagcccttcattaagccgcg

SEQ ID NO: 8011 - DNA, 25 bp, Artificial Sequence
  Synthetic Oligonucleotide
gtctaaccccttcaggtccgggtcg

SEQ ID NO: 8012 - DNA, 25 bp, Artificial Sequence
  Synthetic Oligonucleotide
atcacctcgccgaagggcctgaacg

SEQ ID NO: 8013 - DNA, 25 bp, Artificial Sequence
  Synthetic Oligonucleotide
gcaaaccggtacagcggcgctggat

SEQ ID NO: 8014 - DNA, 25 bp, Artificial Sequence
  Synthetic Oligonucleotide
aagacgtacgccagccgctacgggc

SEQ ID NO: 8015 - DNA, 25 bp, Artificial Sequence
  Synthetic Oligonucleotide
aaaagctaccacagcctccgaagct

SEQ ID NO: 8016 - DNA, 25 bp, Artificial Sequence
  Synthetic Oligonucleotide
aaaagctaccacagcctccgaagct

SEQ ID NO: 8017 - DNA, 25 bp, Artificial Sequence
  Synthetic Oligonucleotide
gcagtcaacctagctctaagaacct

SEQ ID NO: 8018 - DNA, 25 bp, Artificial Sequence
  Synthetic Oligonucleotide
ccgaagtactaataacgtaaaaagc

SEQ ID NO: 8019 - DNA, 25 bp, Artificial Sequence
  Synthetic Oligonucleotide
gactcagacaagcaagtagacgagc

SEQ ID NO: 8020 - DNA, 25 bp, Artificial Sequence
  Synthetic Oligonucleotide
aatcgtgcccgacgtatacgacggc

SEQ ID NO: 8021 - DNA, 25 bp, Artificial Sequence
  Synthetic Oligonucleotide
tggtggaactagaagtacgacgatc

SEQ ID NO: 8022 - DNA, 25 bp, Artificial Sequence
  Synthetic Oligonucleotide
ggtcggtggagctactaaccgtgtc

SEQ ID NO: 8023 - DNA, 25 bp, Artificial Sequence
  Synthetic Oligonucleotide
tatcgggtttagtgcttttacgggc

SEQ ID NO: 8024 - DNA, 25 bp, Artificial Sequence
  Synthetic Oligonucleotide
tcgggcttggagctgttccactagc

SEQ ID NO: 8025 - DNA, 25 bp, Artificial Sequence
  Synthetic Oligonucleotide
ggcgggaagtacttctcgcactcgc

SEQ ID NO: 8026 - DNA, 25 bp, Artificial Sequence
  Synthetic Oligonucleotide
ttagtggacgaccttccacgactcc

SEQ ID NO: 8027 - DNA, 25 bp, Artificial Sequence
  Synthetic Oligonucleotide
gcgattatggcgtatgcaggactcc

SEQ ID NO: 8028 - DNA, 25 bp, Artificial Sequence
  Synthetic Oligonucleotide
gttactttgccctgtgctggttcct

SEQ ID NO: 8029 - DNA, 25 bp, Artificial Sequence
  Synthetic Oligonucleotide
gctacctgcccttgtgtcgggatcc

SEQ ID NO: 8030 - DNA, 25 bp, Artificial Sequence
  Synthetic Oligonucleotide
cttaactgcccctgggcgtgttcgc

SEQ ID NO: 8031 - DNA, 25 bp, Artificial Sequence
  Synthetic Oligonucleotide
taactcgacctcttgccggtgttcc

SEQ ID NO: 8032 - DNA, 25 bp, Artificial Sequence
  Synthetic Oligonucleotide
agttgctgtatcagccgaggtctcc

SEQ ID NO: 8033 - DNA, 25 bp, Artificial Sequence
  Synthetic Oligonucleotide
gatagatgtgtaagttacaggccgc

SEQ ID NO: 8034 - DNA, 25 bp, Artificial Sequence
  Synthetic Oligonucleotide
cggtaagtggtactgtacaggctcc

SEQ ID NO: 8035 - DNA, 25 bp, Artificial Sequence
  Synthetic Oligonucleotide
gggcaagtgttactaaagtcgtccc

SEQ ID NO: 8036 - DNA, 25 bp, Artificial Sequence
  Synthetic Oligonucleotide
ggctcatcgaccctaatgtccgcgc

SEQ ID NO: 8037 - DNA, 25 bp, Artificial Sequence
  Synthetic Oligonucleotide
cggtcaacgcctacaggtgcgcgtc

SEQ ID NO: 8038 - DNA, 25 bp, Artificial Sequence
  Synthetic Oligonucleotide
atcgcaacgacctcgttggacggtc

SEQ ID NO: 8039 - DNA, 25 bp, Artificial Sequence
  Synthetic Oligonucleotide
tgctatctacccttctgtcgtgctc

SEQ ID NO: 8040 - DNA, 25 bp, Artificial Sequence
  Synthetic Oligonucleotide
cacgatgttaccgcgtatgtttctc

SEQ ID NO: 8041 - DNA, 25 bp, Artificial Sequence
  Synthetic Oligonucleotide
cgacagaagtctgtgtggtcttctc

SEQ ID NO: 8042 - DNA, 25 bp, Artificial Sequence
  Synthetic Oligonucleotide
cacggaaacgtctttgtttcagtcc

SEQ ID NO: 8043 - DNA, 25 bp, Artificial Sequence
  Synthetic Oligonucleotide
actgaaagttatctagcgtcgctcc

SEQ ID NO: 8044 - DNA, 25 bp, Artificial Sequence
  Synthetic Oligonucleotide
ctgaccgaagagtggcttctcttcc

SEQ ID NO: 8045 - DNA, 25 bp, Artificial Sequence
  Synthetic Oligonucleotide
ttaggaaagagaggacatcggttcc

SEQ ID NO: 8046 - DNA, 25 bp, Artificial Sequence
  Synthetic Oligonucleotide
gcgcattgatcaatcgtacggtctc

SEQ ID NO: 8047 - DNA, 25 bp, Artificial Sequence
  Synthetic Oligonucleotide
gtcgccgattcacagttctcggctc

SEQ ID NO: 8048 - DNA, 25 bp, Artificial Sequence
  Synthetic Oligonucleotide
ttcgcgcttgagtcggttcggcgtc

SEQ ID NO: 8049 - DNA, 25 bp, Artificial Sequence
  Synthetic Oligonucleotide
acttgattgacgacggtcctaggtc

SEQ ID NO: 8050 - DNA, 25 bp, Artificial Sequence
  Synthetic Oligonucleotide
tataaatgtaaccaggtcggtggtc

SEQ ID NO: 8051 - DNA, 25 bp, Artificial Sequence
  Synthetic Oligonucleotide
ttgttaaaaaggtcggctctgggtc

SEQ ID NO: 8052 - DNA, 25 bp, Artificial Sequence
  Synthetic Oligonucleotide
ataaagtgaccgcggcttcgagggt

SEQ ID NO: 8053 - DNA, 25 bp, Artificial Sequence
  Synthetic Oligonucleotide
ataacatgcaggtccgtggcggtcg

SEQ ID NO: 8054 - DNA, 25 bp, Artificial Sequence
  Synthetic Oligonucleotide
aactgctgcaggtacgggagctgct

SEQ ID NO: 8055 - DNA, 25 bp, Artificial Sequence
  Synthetic Oligonucleotide
ggacagcggcatctacctgagcggc

SEQ ID NO: 8056 - DNA, 25 bp, Artificial Sequence
  Synthetic Oligonucleotide
gacagcggcatctacctgagcggcg

SEQ ID NO: 8057 - DNA, 25 bp, Artificial Sequence
  Synthetic Oligonucleotide
gacggaaggaacctacaccatcggc

SEQ ID NO: 8058 - DNA, 25 bp, Artificial Sequence
  Synthetic Oligonucleotide
gacggaaggaacctacaccatcggc

SEQ ID NO: 8059 - DNA, 25 bp, Artificial Sequence
  Synthetic Oligonucleotide
tacaaggcgtaactcgacctcttgc

SEQ ID NO: 8060 - DNA, 25 bp, Artificial Sequence
  Synthetic Oligonucleotide
tctcacggagtcccgtcgccttggc

SEQ ID NO: 8061 - DNA, 25 bp, Artificial Sequence
  Synthetic Oligonucleotide
ctctctggagaaacgggattcgtgc

SEQ ID NO: 8062 - DNA, 25 bp, Artificial Sequence
  Synthetic Oligonucleotide
ctccggagtgattcggtaagttagc

SEQ ID NO: 8063 - DNA, 25 bp, Artificial Sequence
  Synthetic Oligonucleotide
ccaacgaggtcgttgcgattttagc

SEQ ID NO: 8064 - DNA, 25 bp, Artificial Sequence
  Synthetic Oligonucleotide
agagattatgcgtactactgtcgtc

SEQ ID NO: 8065 - DNA, 25 bp, Artificial Sequence
  Synthetic Oligonucleotide
gagattatgcgtactactgtcgtcg

SEQ ID NO: 8066 - DNA, 25 bp, Artificial Sequence
  Synthetic Oligonucleotide
ggtagtatgactcgttagtgtcggc

SEQ ID NO: 8067 - DNA, 25 bp, Artificial Sequence
  Synthetic Oligonucleotide
ggtagttgacggttaccttgacgtc

SEQ ID NO: 8068 - DNA, 25 bp, Artificial Sequence
  Synthetic Oligonucleotide
caagtccgacgatttctactgcgtc

SEQ ID NO: 8069 - DNA, 25 bp, Artificial Sequence
  Synthetic Oligonucleotide
tcgacggctccgttgttaacggctc

SEQ ID NO: 8070 - DNA, 25 bp, Artificial Sequence
  Synthetic Oligonucleotide
aggacttgccatcgtagaactgctg

SEQ ID NO: 8071 - DNA, 25 bp, Artificial Sequence
  Synthetic Oligonucleotide
cagcagttctacgatggcaagtcct

SEQ ID NO: 8072 - DNA, 25 bp, Artificial Sequence
  Synthetic Oligonucleotide
gtacggcctcgggaacagctgctgc

SEQ ID NO: 8073 - DNA, 25 bp, Artificial Sequence
  Synthetic Oligonucleotide
tagagtccagggaataatcgctcgc

SEQ ID NO: 8074 - DNA, 25 bp, Artificial Sequence
  Synthetic Oligonucleotide
gtatggtcaaggaaatagcgtctgc

SEQ ID NO: 8075 - DNA, 25 bp, Artificial Sequence
  Synthetic Oligonucleotide
gactgaaagttaactagcgtcgctc

SEQ ID NO: 8076 - DNA, 25 bp, Artificial Sequence
  Synthetic Oligonucleotide
aatgacaacgcaataggtcgacgtc

SEQ ID NO: 8077 - DNA, 25 bp, Artificial Sequence
  Synthetic Oligonucleotide
gtattgactaaaatactcggtaagc

SEQ ID NO: 8078 - DNA, 25 bp, Artificial Sequence
  Synthetic Oligonucleotide
gacgttgactctatatgtccatctc

SEQ ID NO: 8079 - DNA, 25 bp, Artificial Sequence
  Synthetic Oligonucleotide
ggtaggactattaacctgtcatgtc

SEQ ID NO: 8080 - DNA, 25 bp, Artificial Sequence
  Synthetic Oligonucleotide
agtggagtgtacatactcttaattc

SEQ ID NO: 8081 - DNA, 25 bp, Artificial Sequence
  Synthetic Oligonucleotide
gagtagcacgctaagcattatgttc

SEQ ID NO: 8082 - DNA, 25 bp, Artificial Sequence
  Synthetic Oligonucleotide
gttggtaccatctggatctatgatg

SEQ ID NO: 8083 - DNA, 25 bp, Artificial Sequence
  Synthetic Oligonucleotide
agtggtaccatcggtgccgctgatg

SEQ ID NO: 8084 - DNA, 25 bp, Artificial Sequence
  Synthetic Oligonucleotide
agcggtaccgaaacggaccttgacc

SEQ ID NO: 8085 - DNA, 25 bp, Artificial Sequence
  Synthetic Oligonucleotide
aggagagaagtagcgaccttgactc

SEQ ID NO: 8086 - DNA, 25 bp, Artificial Sequence
  Synthetic Oligonucleotide
tacagagaagtgatacagtttgatc

SEQ ID NO: 8087 - DNA, 25 bp, Artificial Sequence
  Synthetic Oligonucleotide
tagaaatacttgcacgttcgagatc

SEQ ID NO: 8088 - DNA, 25 bp, Artificial Sequence
  Synthetic Oligonucleotide
tactaaagttatcgacatagtcatc

SEQ ID NO: 8089 - DNA, 25 bp, Artificial Sequence
  Synthetic Oligonucleotide
actcgaagtgtttcaacagtaactc

SEQ ID NO: 8090 - DNA, 25 bp, Artificial Sequence
  Synthetic Oligonucleotide
gctttggatgcaggaacggtagatc

SEQ ID NO: 8091 - DNA, 25 bp, Artificial Sequence
  Synthetic Oligonucleotide
tcaatgtcgagtgacgtggtacttc

SEQ ID NO: 8092 - DNA, 25 bp, Artificial Sequence
  Synthetic Oligonucleotide
tacgtgtacgactctcgagctactc

SEQ ID NO: 8093 - DNA, 25 bp, Artificial Sequence
  Synthetic Oligonucleotide
ctttctcagagaggtcgaggtactc

SEQ ID NO: 8094 - DNA, 25 bp, Artificial Sequence
  Synthetic Oligonucleotide
tctaaaaaagtgtcgacgtagtatc

SEQ ID NO: 8095 - DNA, 25 bp, Artificial Sequence
  Synthetic Oligonucleotide
gtccaaagaggtgcgccgtacagtc

SEQ ID NO: 8096 - DNA, 25 bp, Artificial Sequence
  Synthetic Oligonucleotide
tcacctcagtatcaccttgtacatc

SEQ ID NO: 8097 - DNA, 25 bp, Artificial Sequence
  Synthetic Oligonucleotide
ccatctcagtatcaccttgtacatc

SEQ ID NO: 8098 - DNA, 25 bp, Artificial Sequence
  Synthetic Oligonucleotide
tccctccggagtcactgggacgacc

SEQ ID NO: 8099 - DNA, 25 bp, Artificial Sequence
  Synthetic Oligonucleotide
ctcacttccctttcagtgaggactc

SEQ ID NO: 8100 - DNA, 25 bp, Artificial Sequence
  Synthetic Oligonucleotide
ccgtatgtccctcttgtgtcggacc

SEQ ID NO: 8101 - DNA, 25 bp, Artificial Sequence
  Synthetic Oligonucleotide
actactgtcgtccttttgcgaaccc

SEQ ID NO: 8102 - DNA, 25 bp, Artificial Sequence
  Synthetic Oligonucleotide
aattcgcttcagactgtgaacgacc

SEQ ID NO: 8103 - DNA, 25 bp, Artificial Sequence
  Synthetic Oligonucleotide
gattggtcgcagtcctgttgtaccg

SEQ ID NO: 8104 - DNA, 25 bp, Artificial Sequence
  Synthetic Oligonucleotide
ttggtaccggtgtctcgatagtatc

SEQ ID NO: 8105 - DNA, 25 bp, Artificial Sequence
  Synthetic Oligonucleotide
cttgggtcccggtacgcgaacgatc

SEQ ID NO: 8106 - DNA, 25 bp, Artificial Sequence
  Synthetic Oligonucleotide
ttcgggtcatcgaccgtcgaatccg

SEQ ID NO: 8107 - DNA, 25 bp, Artificial Sequence
  Synthetic Oligonucleotide
tggcacgagttatcccatgaactcc

SEQ ID NO: 8108 - DNA, 25 bp, Artificial Sequence
  Synthetic Oligonucleotide
attccgagcggttcccacggggtcc

SEQ ID NO: 8109 - DNA, 25 bp, Artificial Sequence
  Synthetic Oligonucleotide
tattggacgaagtctccggggtgcc

SEQ ID NO: 8110 - DNA, 25 bp, Artificial Sequence
  Synthetic Oligonucleotide
tccgaaacacttacggcggtcgctc

SEQ ID NO: 8111 - DNA, 25 bp, Artificial Sequence
  Synthetic Oligonucleotide
ccttcgattcctaggagctctgctc

SEQ ID NO: 8112 - DNA, 25 bp, Artificial Sequence
  Synthetic Oligonucleotide
tactatgtcttcaaagctcttcgtc

SEQ ID NO: 8113 - DNA, 25 bp, Artificial Sequence
  Synthetic Oligonucleotide
tcgtcgttggtacgtactcttcgtc

SEQ ID NO: 8114 - DNA, 25 bp, Artificial Sequence
  Synthetic Oligonucleotide
cctatcgtgtcgcacctatcgttgc

SEQ ID NO: 8115 - DNA, 25 bp, Artificial Sequence
  Synthetic Oligonucleotide
ctcccgtatgggcagcatctacccg

SEQ ID NO: 8116 - DNA, 25 bp, Artificial Sequence
  Synthetic Oligonucleotide
ttccgtcttgggtacattacgtcgc

SEQ ID NO: 8117 - DNA, 25 bp, Artificial Sequence
  Synthetic Oligonucleotide
ttaagcgtgcgggttactactttgc

SEQ ID NO: 8118 - DNA, 25 bp, Artificial Sequence
  Synthetic Oligonucleotide
tcaatcgtacggactcagagcaagc

SEQ ID NO: 8119 - DNA, 25 bp, Artificial Sequence
  Synthetic Oligonucleotide
aaagcgtggagtgacagtcatagtc

SEQ ID NO: 8120 - DNA, 25 bp, Artificial Sequence
  Synthetic Oligonucleotide
aataatctgctggtgtaggtatatc

SEQ ID NO: 8121 - DNA, 25 bp, Artificial Sequence
  Synthetic Oligonucleotide
ttttacgtctgtggtgagatacgtc

SEQ ID NO: 8122 - DNA, 25 bp, Artificial Sequence
  Synthetic Oligonucleotide
agtttagttgtactacgactacatc

SEQ ID NO: 8123 - DNA, 25 bp, Artificial Sequence
  Synthetic Oligonucleotide
gtcgacttttgatctacacttactc

SEQ ID NO: 8124 - DNA, 25 bp, Artificial Sequence
  Synthetic Oligonucleotide
ggtcgtagtttcgatcttctcactc

SEQ ID NO: 8125 - DNA, 25 bp, Artificial Sequence
  Synthetic Oligonucleotide
aagtgttcgtttattcatctgagtc

SEQ ID NO: 8126 - DNA, 25 bp, Artificial Sequence
  Synthetic Oligonucleotide
aacgagtttcccatctccagggacc

SEQ ID NO: 8127 - DNA, 25 bp, Artificial Sequence
  Synthetic Oligonucleotide
gcggctttctggatcccaaggacgc

SEQ ID NO: 8128 - DNA, 25 bp, Artificial Sequence
  Synthetic Oligonucleotide
gcatgtctagcgattcccacgggtc

SEQ ID NO: 8129 - DNA, 25 bp, Artificial Sequence
  Synthetic Oligonucleotide
agctactgcgggtgcccaaggtacg

SEQ ID NO: 8130 - DNA, 25 bp, Artificial Sequence
  Synthetic Oligonucleotide
agaaagcggcgtgtctgcagaggtt

SEQ ID NO: 8131 - DNA, 25 bp, Artificial Sequence
  Synthetic Oligonucleotide
aacacccgcgtcgcttgacttgggt

SEQ ID NO: 8132 - DNA, 25 bp, Artificial Sequence
  Synthetic Oligonucleotide
aaaacagaccactccattcaggggt

SEQ ID NO: 8133 - DNA, 25 bp, Artificial Sequence
  Synthetic Oligonucleotide
aattagaaccctgtattgtcaaggg

SEQ ID NO: 8134 - DNA, 25 bp, Artificial Sequence
  Synthetic Oligonucleotide
cggaagcctcccatagtcacagggt

SEQ ID NO: 8135 - DNA, 25 bp, Artificial Sequence
  Synthetic Oligonucleotide
tgcgataacctccaccttaatggcg

SEQ ID NO: 8136 - DNA, 25 bp, Artificial Sequence
  Synthetic Oligonucleotide
ttgacaagccctacattaagccgcg

SEQ ID NO: 8137 - DNA, 25 bp, Artificial Sequence
  Synthetic Oligonucleotide
gtctaaccccttgaggtccgggtcg

SEQ ID NO: 8138 - DNA, 25 bp, Artificial Sequence
  Synthetic Oligonucleotide
atcacctcgccgtagggcctgaacg

SEQ ID NO: 8139 - DNA, 25 bp, Artificial Sequence
  Synthetic Oligonucleotide
gcaaaccggtactgcggcgctggat

SEQ ID NO: 8140 - DNA, 25 bp, Artificial Sequence
  Synthetic Oligonucleotide
aagacgtacgcctgccgctacgggc

SEQ ID NO: 8141 - DNA, 25 bp, Artificial Sequence
  Synthetic Oligonucleotide
aaaagctaccactgcctccgaagct

SEQ ID NO: 8142 - DNA, 25 bp, Artificial Sequence
  Synthetic Oligonucleotide
aaaagctaccactgcctccgaagct

SEQ ID NO: 8143 - DNA, 25 bp, Artificial Sequence
  Synthetic Oligonucleotide
gcagtcaacctacctctaagaacct

SEQ ID NO: 8144 - DNA, 25 bp, Artificial Sequence
  Synthetic Oligonucleotide
ccgaagtactaaaaacgtaaaaagc

SEQ ID NO: 8145 - DNA, 25 bp, Artificial Sequence
  Synthetic Oligonucleotide
gactcagacaaggaagtagacgagc

SEQ ID NO: 8146 - DNA, 25 bp, Artificial Sequence
  Synthetic Oligonucleotide
aatcgtgcccgaggtatacgacggc

SEQ ID NO: 8147 - DNA, 25 bp, Artificial Sequence
  Synthetic Oligonucleotide
tggtggaactagtagtacgacgatc

SEQ ID NO: 8148 - DNA, 25 bp, Artificial Sequence
  Synthetic Oligonucleotide
ggtcggtggagcaactaaccgtgtc

SEQ ID NO: 8149 - DNA, 25 bp, Artificial Sequence
  Synthetic Oligonucleotide
tatcgggtttagagcttttacgggc

SEQ ID NO: 8150 - DNA, 25 bp, Artificial Sequence
  Synthetic Oligonucleotide
tcgggcttggaggtgttccactagc

SEQ ID NO: 8151 - DNA, 25 bp, Artificial Sequence
  Synthetic Oligonucleotide
ggcgggaagtacatctcgcactcgc

SEQ ID NO: 8152 - DNA, 25 bp, Artificial Sequence
  Synthetic Oligonucleotide
ttagtggacgacgttccacgactcc

SEQ ID NO: 8153 - DNA, 25 bp, Artificial Sequence
  Synthetic Oligonucleotide
gcgattatggcgaatgcaggactcc

SEQ ID NO: 8154 - DNA, 25 bp, Artificial Sequence
  Synthetic Oligonucleotide
gttactttgcccagtgctggttcct

SEQ ID NO: 8155 - DNA, 25 bp, Artificial Sequence
  Synthetic Oligonucleotide
gctacctgccctagtgtcgggatcc

SEQ ID NO: 8156 - DNA, 25 bp, Artificial Sequence
  Synthetic Oligonucleotide
cttaactgccccagggcgtgttcgc

SEQ ID NO: 8157 - DNA, 25 bp, Artificial Sequence
  Synthetic Oligonucleotide
taactcgacctcatgccggtgttcc

SEQ ID NO: 8158 - DNA, 25 bp, Artificial Sequence
  Synthetic Oligonucleotide
agttgctgtatctgccgaggtctcc

SEQ ID NO: 8159 - DNA, 25 bp, Artificial Sequence
  Synthetic Oligonucleotide
gatagatgtgtatgttacaggccgc

SEQ ID NO: 8160 - DNA, 25 bp, Artificial Sequence
  Synthetic Oligonucleotide
cggtaagtggtagtgtacaggctcc

SEQ ID NO: 8161 - DNA, 25 bp, Artificial Sequence
  Synthetic Oligonucleotide
gggcaagtgttagtaaagtcgtccc

SEQ ID NO: 8162 - DNA, 25 bp, Artificial Sequence
  Synthetic Oligonucleotide
ggctcatcgaccgtaatgtccgcgc

SEQ ID NO: 8163 - DNA, 25 bp, Artificial Sequence
  Synthetic Oligonucleotide
cggtcaacgccttcaggtgcgcgtc

SEQ ID NO: 8164 - DNA, 25 bp, Artificial Sequence
  Synthetic Oligonucleotide
atcgcaacgaccacgttggacggtc

SEQ ID NO: 8165 - DNA, 25 bp, Artificial Sequence
  Synthetic Oligonucleotide
tgctatctacccatctgtcgtgctc

SEQ ID NO: 8166 - DNA, 25 bp, Artificial Sequence
  Synthetic Oligonucleotide
cacgatgttaccccgtatgtttctc

SEQ ID NO: 8167 - DNA, 25 bp, Artificial Sequence
  Synthetic Oligonucleotide
cgacagaagtctctgtggtcttctc

SEQ ID NO: 8168 - DNA, 25 bp, Artificial Sequence
  Synthetic Oligonucleotide
cacggaaacgtcattgtttcagtcc

SEQ ID NO: 8169 - DNA, 25 bp, Artificial Sequence
  Synthetic Oligonucleotide
actgaaagttatgtagcgtcgctcc

SEQ ID NO: 8170 - DNA, 25 bp, Artificial Sequence
  Synthetic Oligonucleotide
ctgaccgaagagaggcttctcttcc

SEQ ID NO: 8171 - DNA, 25 bp, Artificial Sequence
  Synthetic Oligonucleotide
ttaggaaagagacgacatcggttcc

SEQ ID NO: 8172 - DNA, 25 bp, Artificial Sequence
  Synthetic Oligonucleotide
gcgcattgatcattcgtacggtctc

SEQ ID NO: 8173 - DNA, 25 bp, Artificial Sequence
  Synthetic Oligonucleotide
gtcgccgattcagagttctcggctc

SEQ ID NO: 8174 - DNA, 25 bp, Artificial Sequence
  Synthetic Oligonucleotide
ttcgcgcttgagacggttcggcgtc

SEQ ID NO: 8175 - DNA, 25 bp, Artificial Sequence
  Synthetic Oligonucleotide
acttgattgacgtcggtcctaggtc

SEQ ID NO: 8176 - DNA, 25 bp, Artificial Sequence
  Synthetic Oligonucleotide
tataaatgtaacgaggtcggtggtc

SEQ ID NO: 8177 - DNA, 25 bp, Artificial Sequence
  Synthetic Oligonucleotide
ttgttaaaaaggacggctctgggtc

SEQ ID NO: 8178 - DNA, 25 bp, Artificial Sequence
  Synthetic Oligonucleotide
ataaagtgaccggggcttcgagggt

SEQ ID NO: 8179 - DNA, 25 bp, Artificial Sequence
  Synthetic Oligonucleotide
ataacatgcaggaccgtggcggtcg

SEQ ID NO: 8180 - DNA, 25 bp, Artificial Sequence
  Synthetic Oligonucleotide
aactgctgcaggaacgggagctgct

SEQ ID NO: 8181 - DNA, 25 bp, Artificial Sequence
  Synthetic Oligonucleotide
ggacagcggcatgtacctgagcggc

SEQ ID NO: 8182 - DNA, 25 bp, Artificial Sequence
  Synthetic Oligonucleotide
gacagcggcatcaacctgagcggcg

SEQ ID NO: 8183 - DNA, 25 bp, Artificial Sequence
  Synthetic Oligonucleotide
gacggaaggaacgtacaccatcggc

SEQ ID NO: 8184 - DNA, 25 bp, Artificial Sequence
  Synthetic Oligonucleotide
gacggaaggaacgtacaccatcggc

SEQ ID NO: 8185 - DNA, 25 bp, Artificial Sequence
  Synthetic Oligonucleotide
tacaaggcgtaagtcgacctcttgc

SEQ ID NO: 8186 - DNA, 25 bp, Artificial Sequence
  Synthetic Oligonucleotide
tctcacggagtcgcgtcgccttggc

SEQ ID NO: 8187 - DNA, 25 bp, Artificial Sequence
  Synthetic Oligonucleotide
ctctctggagaatcgggattcgtgc

SEQ ID NO: 8188 - DNA, 25 bp, Artificial Sequence
  Synthetic Oligonucleotide
ctccggagtgatacggtaagttagc

SEQ ID NO: 8189 - DNA, 25 bp, Artificial Sequence
  Synthetic Oligonucleotide
ccaacgaggtcgatgcgattttagc

SEQ ID NO: 8190 - DNA, 25 bp, Artificial Sequence
  Synthetic Oligonucleotide
agagattatgcgaactactgtcgtc

SEQ ID NO: 8191 - DNA, 25 bp, Artificial Sequence
  Synthetic Oligonucleotide
gagattatgcgttctactgtcgtcg

SEQ ID NO: 8192 - DNA, 25 bp, Artificial Sequence
  Synthetic Oligonucleotide
ggtagtatgactggttagtgtcggc

SEQ ID NO: 8193 - DNA, 25 bp, Artificial Sequence
  Synthetic Oligonucleotide
ggtagttgacggataccttgacgtc

SEQ ID NO: 8194 - DNA, 25 bp, Artificial Sequence
  Synthetic Oligonucleotide
caagtccgacgaattctactgcgtc

SEQ ID NO: 8195 - DNA, 25 bp, Artificial Sequence
  Synthetic Oligonucleotide
tcgacggctccgatgttaacggctc

SEQ ID NO: 8196 - DNA, 25 bp, Artificial Sequence
  Synthetic Oligonucleotide
cagcagttctacgatggcaagtcct

SEQ ID NO: 8197 - DNA, 25 bp, Artificial Sequence
  Synthetic Oligonucleotide
aggacttgccatcgtagaactgctg

SEQ ID NO: 8198 - DNA, 25 bp, Artificial Sequence
  Synthetic Oligonucleotide
acgttactggaactgctcgtctctc

SEQ ID NO: 8199 - DNA, 25 bp, Artificial Sequence
  Synthetic Oligonucleotide
agttgatggtaaacgaccgtttctc

SEQ ID NO: 8200 - DNA, 25 bp, Artificial Sequence
  Synthetic Oligonucleotide
cttgtgttctgtaatgatcgtttgc

SEQ ID NO: 8201 - DNA, 25 bp, Artificial Sequence
  Synthetic Oligonucleotide
ttggtgtctacaaataatctgctgc

SEQ ID NO: 8202 - DNA, 25 bp, Artificial Sequence
  Synthetic Oligonucleotide
ggtctacacaccactcgtgtcagtc

SEQ ID NO: 8203 - DNA, 25 bp, Artificial Sequence
  Synthetic Oligonucleotide
cggtgcacacacgtagtcgagcagc

SEQ ID NO: 8204 - DNA, 25 bp, Artificial Sequence
  Synthetic Oligonucleotide
aggtgtagacaaccttccacgactc

SEQ ID NO: 8205 - DNA, 25 bp, Artificial Sequence
  Synthetic Oligonucleotide
gtaagtccaacacttcttccgactc

SEQ ID NO: 8206 - DNA, 25 bp, Artificial Sequence
  Synthetic Oligonucleotide
gaagaccgaacaattcctaccgctc

SEQ ID NO: 8207 - DNA, 25 bp, Artificial Sequence
  Synthetic Oligonucleotide
agagtagagacaattgctacatgtc

SEQ ID NO: 8208 - DNA, 25 bp, Artificial Sequence
  Synthetic Oligonucleotide
ccgagagattatgcgtactactgtc

SEQ ID NO: 8209 - DNA, 25 bp, Artificial Sequence
  Synthetic Oligonucleotide
cttctaagctcttcgtcgctctctc

SEQ ID NO: 8210 - DNA, 25 bp, Artificial Sequence
  Synthetic Oligonucleotide
tagatacaaggtagatcgtcctgtc

SEQ ID NO: 8211 - DNA, 25 bp, Artificial Sequence
  Synthetic Oligonucleotide
tgagtttaggtaggcttctgtagtc

SEQ ID NO: 8212 - DNA, 25 bp, Artificial Sequence
  Synthetic Oligonucleotide
tcctctgagagaacctctatgtatc

SEQ ID NO: 8213 - DNA, 25 bp, Artificial Sequence
  Synthetic Oligonucleotide
ttcttgacgagaaccgacagagatc

SEQ ID NO: 8214 - DNA, 25 bp, Artificial Sequence
  Synthetic Oligonucleotide
tgtccacgacgtaccgacagcagtc

SEQ ID NO: 8215 - DNA, 25 bp, Artificial Sequence
  Synthetic Oligonucleotide
ctggacgtcgacaccgcagtctagc

SEQ ID NO: 8216 - DNA, 25 bp, Artificial Sequence
  Synthetic Oligonucleotide
ttggttgaccgtgacgacacgcggc

SEQ ID NO: 8217 - DNA, 25 bp, Artificial Sequence
  Synthetic Oligonucleotide
cgcgttcggactacgtcggtacggc

SEQ ID NO: 8218 - DNA, 25 bp, Artificial Sequence
  Synthetic Oligonucleotide
cccgtttcagacgagcgagactctc

SEQ ID NO: 8219 - DNA, 25 bp, Artificial Sequence
  Synthetic Oligonucleotide
ggtcctttgttaagaccgagtatcc

SEQ ID NO: 8220 - DNA, 25 bp, Artificial Sequence
  Synthetic Oligonucleotide
tcgtttttagacatagggtcattcc

SEQ ID NO: 8221 - DNA, 25 bp, Artificial Sequence
  Synthetic Oligonucleotide
ttacactaacagaagggtcattctc

SEQ ID NO: 8222 - DNA, 25 bp, Artificial Sequence
  Synthetic Oligonucleotide
tgtaaagacggtaggtgtcatatcc

SEQ ID NO: 8223 - DNA, 25 bp, Artificial Sequence
  Synthetic Oligonucleotide
taacgaatatgaatctgtacgtacc

SEQ ID NO: 8224 - DNA, 25 bp, Artificial Sequence
  Synthetic Oligonucleotide
tcatcggtacaacaggtctgcgacc

SEQ ID NO: 8225 - DNA, 25 bp, Artificial Sequence
  Synthetic Oligonucleotide
atggacgcatggctctagcgactcg

SEQ ID NO: 8226 - DNA, 25 bp, Artificial Sequence
  Synthetic Oligonucleotide
ttcgcctatgtccgtcgcgctaccg

SEQ ID NO: 8227 - DNA, 25 bp, Artificial Sequence
  Synthetic Oligonucleotide
ctatctacccttctgtcgtgctcct

SEQ ID NO: 8228 - DNA, 25 bp, Artificial Sequence
  Synthetic Oligonucleotide
tttcacgaccctaatgtccgcactc

SEQ ID NO: 8229 - DNA, 25 bp, Artificial Sequence
  Synthetic Oligonucleotide
gattcttagcaccttttctgtcccg

SEQ ID NO: 8230 - DNA, 25 bp, Artificial Sequence
  Synthetic Oligonucleotide
attttagcacgtagtttgagtcggc

SEQ ID NO: 8231 - DNA, 25 bp, Artificial Sequence
  Synthetic Oligonucleotide
ccttttgctactgaggttggcacgg

SEQ ID NO: 8232 - DNA, 25 bp, Artificial Sequence
  Synthetic Oligonucleotide
acctttaggtctttgttgtggcccg

SEQ ID NO: 8233 - DNA, 25 bp, Artificial Sequence
  Synthetic Oligonucleotide
atttatcatgtgttactttgccctg

SEQ ID NO: 8234 - DNA, 25 bp, Artificial Sequence
  Synthetic Oligonucleotide
tggtactgcgggaccactgctcccg

SEQ ID NO: 8235 - DNA, 25 bp, Artificial Sequence
  Synthetic Oligonucleotide
taagcgtaggacgggctcctggccc

SEQ ID NO: 8236 - DNA, 25 bp, Artificial Sequence
  Synthetic Oligonucleotide
gacagtgaaccagcaccgtcgggcc

SEQ ID NO: 8237 - DNA, 25 bp, Artificial Sequence
  Synthetic Oligonucleotide
atgagagtccatgaccgaccggacc

SEQ ID NO: 8238 - DNA, 25 bp, Artificial Sequence
  Synthetic Oligonucleotide
gaaagtcgcttgcgtaccgtgactc

SEQ ID NO: 8239 - DNA, 25 bp, Artificial Sequence
  Synthetic Oligonucleotide
aaagagtatgttagacttcggactc

SEQ ID NO: 8240 - DNA, 25 bp, Artificial Sequence
  Synthetic Oligonucleotide
acaagcgtgtgaagcttccgtcgtc

SEQ ID NO: 8241 - DNA, 25 bp, Artificial Sequence
  Synthetic Oligonucleotide
cttgagacctggaagccttctcgtc

SEQ ID NO: 8242 - DNA, 25 bp, Artificial Sequence
  Synthetic Oligonucleotide
cttggtccgtgagttccggtcggtc

SEQ ID NO: 8243 - DNA, 25 bp, Artificial Sequence
  Synthetic Oligonucleotide
tctgaacgggaggttacctaggagc

SEQ ID NO: 8244 - DNA, 25 bp, Artificial Sequence
  Synthetic Oligonucleotide
ttctgaatcggtgtgacagggagtc

SEQ ID NO: 8245 - DNA, 25 bp, Artificial Sequence
  Synthetic Oligonucleotide
cccgtacatcgcgttgacaaaagtc

SEQ ID NO: 8246 - DNA, 25 bp, Artificial Sequence
  Synthetic Oligonucleotide
agtacatccgtctctagaagaagtc

SEQ ID NO: 8247 - DNA, 25 bp, Artificial Sequence
  Synthetic Oligonucleotide
gatagtaagctctagacgaagaatc

SEQ ID NO: 8248 - DNA, 25 bp, Artificial Sequence
  Synthetic Oligonucleotide
gaacttgaactttaacgactcaagc

SEQ ID NO: 8249 - DNA, 25 bp, Artificial Sequence
  Synthetic Oligonucleotide
cactaagccttgaagctactagagc

SEQ ID NO: 8250 - DNA, 25 bp, Artificial Sequence
  Synthetic Oligonucleotide
cgtactagaggccataactttgagg

SEQ ID NO: 8251 - DNA, 25 bp, Artificial Sequence
  Synthetic Oligonucleotide
actaagtggctattcatgtcgagcg

SEQ ID NO: 8252 - DNA, 25 bp, Artificial Sequence
  Synthetic Oligonucleotide
aggtaaaggaccagtatcaggtccc

SEQ ID NO: 8253 - DNA, 25 bp, Artificial Sequence
  Synthetic Oligonucleotide
gacagttaggacaggcacaggcccg

SEQ ID NO: 8254 - DNA, 25 bp, Artificial Sequence
  Synthetic Oligonucleotide
gacagttaggaataacacagacctg

SEQ ID NO: 8255 - DNA, 25 bp, Artificial Sequence
  Synthetic Oligonucleotide
cagaagttgcaacaaacaaagtcgt

SEQ ID NO: 8256 - DNA, 25 bp, Artificial Sequence
  Synthetic Oligonucleotide
aaaaggcacggctatcacgagagcg

SEQ ID NO: 8257 - DNA, 25 bp, Artificial Sequence
  Synthetic Oligonucleotide
gaccggaacggctactcctacagct

SEQ ID NO: 8258 - DNA, 25 bp, Artificial Sequence
  Synthetic Oligonucleotide
agagcgagacagcgggtccgacctc

SEQ ID NO: 8259 - DNA, 25 bp, Artificial Sequence
  Synthetic Oligonucleotide
gacctaccgatgcatgtaccgaccc

SEQ ID NO: 8260 - DNA, 25 bp, Artificial Sequence
  Synthetic Oligonucleotide
gacctatcgttgcatgtaccgaccc

SEQ ID NO: 8261 - DNA, 25 bp, Artificial Sequence
  Synthetic Oligonucleotide
gaccactgttagcagaactactccc

SEQ ID NO: 8262 - DNA, 25 bp, Artificial Sequence
  Synthetic Oligonucleotide
attacaaaactgtcggaagcctccc

SEQ ID NO: 8263 - DNA, 25 bp, Artificial Sequence
  Synthetic Oligonucleotide
ctacaagacccgtcggggagccggc

SEQ ID NO: 8264 - DNA, 25 bp, Artificial Sequence
  Synthetic Oligonucleotide
cctagccgcctgtgggtcctcggag

SEQ ID NO: 8265 - DNA, 25 bp, Artificial Sequence
  Synthetic Oligonucleotide
gctggttaccttttggtgatgaagt

SEQ ID NO: 8266 - DNA, 25 bp, Artificial Sequence
  Synthetic Oligonucleotide
gactaggcctccttatggaaggaat

SEQ ID NO: 8267 - DNA, 25 bp, Artificial Sequence
  Synthetic Oligonucleotide
ggtaggcctcaaatgaagatgaggt

SEQ ID NO: 8268 - DNA, 25 bp, Artificial Sequence
  Synthetic Oligonucleotide
gtggaggtcccactatcaaaaaggt

SEQ ID NO: 8269 - DNA, 25 bp, Artificial Sequence
  Synthetic Oligonucleotide
gtggaggttccactaccagaaaggc

SEQ ID NO: 8270 - DNA, 25 bp, Artificial Sequence
  Synthetic Oligonucleotide
ttggagttcacattatcagaaaggc

SEQ ID NO: 8271 - DNA, 25 bp, Artificial Sequence
  Synthetic Oligonucleotide
ttggagctcccactaccagaacggc

SEQ ID NO: 8272 - DNA, 25 bp, Artificial Sequence
  Synthetic Oligonucleotide
gtggaggtcccactaccagaacggc

SEQ ID NO: 8273 - DNA, 25 bp, Artificial Sequence
  Synthetic Oligonucleotide
gcgggacgtccaactgcagaaggtc

SEQ ID NO: 8274 - DNA, 25 bp, Artificial Sequence
  Synthetic Oligonucleotide
gtggcacttcgacttactgcagctc

SEQ ID NO: 8275 - DNA, 25 bp, Artificial Sequence
  Synthetic Oligonucleotide
aagtggcgtcttatttcttacatcc

SEQ ID NO: 8276 - DNA, 25 bp, Artificial Sequence
  Synthetic Oligonucleotide
gggacttatcaggttcatcgatctc

SEQ ID NO: 8277 - DNA, 25 bp, Artificial Sequence
  Synthetic Oligonucleotide
gggtcttgcagattcccgtagtgtc

SEQ ID NO: 8278 - DNA, 25 bp, Artificial Sequence
  Synthetic Oligonucleotide
gctctgtcgccgattcacagttctc

SEQ ID NO: 8279 - DNA, 25 bp, Artificial Sequence
  Synthetic Oligonucleotide
ccacgtccgccgtccgaagtcgtcc

SEQ ID NO: 8280 - DNA, 25 bp, Artificial Sequence
  Synthetic Oligonucleotide
acgtccgacgacaacgcgacattgc

SEQ ID NO: 8281 - DNA, 25 bp, Artificial Sequence
  Synthetic Oligonucleotide
tacgtcggctacgccacgagttcgc

SEQ ID NO: 8282 - DNA, 25 bp, Artificial Sequence
  Synthetic Oligonucleotide
tgttcgtcctcctgccgctattgtc

SEQ ID NO: 8283 - DNA, 25 bp, Artificial Sequence
  Synthetic Oligonucleotide
ctacggtcaccatgccggtctccgc

SEQ ID NO: 8284 - DNA, 25 bp, Artificial Sequence
  Synthetic Oligonucleotide
ctctgcgtaccatggcggctctagc

SEQ ID NO: 8285 - DNA, 25 bp, Artificial Sequence
  Synthetic Oligonucleotide
gtacagcggcacgtaccggctctgc

SEQ ID NO: 8286 - DNA, 25 bp, Artificial Sequence
  Synthetic Oligonucleotide
cgtcaggagctactcctgcgcgagc

SEQ ID NO: 8287 - DNA, 25 bp, Artificial Sequence
  Synthetic Oligonucleotide
cagcagggtcaaccactgctacggc

SEQ ID NO: 8288 - DNA, 25 bp, Artificial Sequence
  Synthetic Oligonucleotide
gaacggcgtcagacgctagcagtgc

SEQ ID NO: 8289 - DNA, 25 bp, Artificial Sequence
  Synthetic Oligonucleotide
cgaccgaggcagtcacatcgcgcgc

SEQ ID NO: 8290 - DNA, 25 bp, Artificial Sequence
  Synthetic Oligonucleotide
gcgcgaccaactcgtacatcgggtc

SEQ ID NO: 8291 - DNA, 25 bp, Artificial Sequence
  Synthetic Oligonucleotide
gtcgtcgtcgaatttacttggtacc

SEQ ID NO: 8292 - DNA, 25 bp, Artificial Sequence
  Synthetic Oligonucleotide
cggacgtcgctaccgttaccgggcc

SEQ ID NO: 8293 - DNA, 25 bp, Artificial Sequence
  Synthetic Oligonucleotide
cagcggcatctacctgagcggcggc

SEQ ID NO: 8294 - DNA, 25 bp, Artificial Sequence
  Synthetic Oligonucleotide
aggagctactcctgcgcgagccggc

SEQ ID NO: 8295 - DNA, 25 bp, Artificial Sequence
  Synthetic Oligonucleotide
atggaccgctactggccgccggtct

SEQ ID NO: 8296 - DNA, 25 bp, Artificial Sequence
  Synthetic Oligonucleotide
gagagaaccgaaggaggtccccgtc

SEQ ID NO: 8297 - DNA, 25 bp, Artificial Sequence
  Synthetic Oligonucleotide
agacgtaaggaggagaatccgcctc

SEQ ID NO: 8298 - DNA, 25 bp, Artificial Sequence
  Synthetic Oligonucleotide
agatgtggacgccacgattggtcgc

SEQ ID NO: 8299 - DNA, 25 bp, Artificial Sequence
  Synthetic Oligonucleotide
gaggtgctacataagccgtggtcgc

SEQ ID NO: 8300 - DNA, 25 bp, Artificial Sequence
  Synthetic Oligonucleotide
aagtagtagtcatagcgtggctcgc

SEQ ID NO: 8301 - DNA, 25 bp, Artificial Sequence
  Synthetic Oligonucleotide
cagtaactctcgttacggtcggggc

SEQ ID NO: 8302 - DNA, 25 bp, Artificial Sequence
  Synthetic Oligonucleotide
ctctcacactctcggtctcggggtc

SEQ ID NO: 8303 - DNA, 25 bp, Artificial Sequence
  Synthetic Oligonucleotide
tctaccgacaggaggacacgggagc

SEQ ID NO: 8304 - DNA, 25 bp, Artificial Sequence
  Synthetic Oligonucleotide
cctcgtagaggatggctcatgacgg

SEQ ID NO: 8305 - DNA, 25 bp, Artificial Sequence
  Synthetic Oligonucleotide
tcccacgaggagtccccggtgtgcg

SEQ ID NO: 8306 - DNA, 25 bp, Artificial Sequence
  Synthetic Oligonucleotide
ccacttctgcggtcacctgaggtgc

SEQ ID NO: 8307 - DNA, 25 bp, Artificial Sequence
  Synthetic Oligonucleotide
actcgttgctgcacttgcgttacgc

SEQ ID NO: 8308 - DNA, 25 bp, Artificial Sequence
  Synthetic Oligonucleotide
ttcgttgcagcgatacttgcgaacc

SEQ ID NO: 8309 - DNA, 25 bp, Artificial Sequence
  Synthetic Oligonucleotide
ttgtcaggcggatcttcgtgaacgc

SEQ ID NO: 8310 - DNA, 25 bp, Artificial Sequence
  Synthetic Oligonucleotide
ttgcaggaaccgtttacgaaagcgt

SEQ ID NO: 8311 - DNA, 25 bp, Artificial Sequence
  Synthetic Oligonucleotide
tacgggaggaacaggacctagaagc

SEQ ID NO: 8312 - DNA, 25 bp, Artificial Sequence
  Synthetic Oligonucleotide
ctacggagagaacgagacccggagc

SEQ ID NO: 8313 - DNA, 25 bp, Artificial Sequence
  Synthetic Oligonucleotide
gctcgtggaacaccggcaagaggtc

SEQ ID NO: 8314 - DNA, 25 bp, Artificial Sequence
  Synthetic Oligonucleotide
gcctggagccgtcgaaacggacgtc

SEQ ID NO: 8315 - DNA, 25 bp, Artificial Sequence
  Synthetic Oligonucleotide
cccggaacgcgaacgatccgttcgc

SEQ ID NO: 8316 - DNA, 25 bp, Artificial Sequence
  Synthetic Oligonucleotide
acgtggaagtacatgagcggctcgc

SEQ ID NO: 8317 - DNA, 25 bp, Artificial Sequence
  Synthetic Oligonucleotide
tacaggggagattgaggtacctgtc

SEQ ID NO: 8318 - DNA, 25 bp, Artificial Sequence
  Synthetic Oligonucleotide
catctagagtctgaggtacgactgc

SEQ ID NO: 8319 - DNA, 25 bp, Artificial Sequence
  Synthetic Oligonucleotide
tagttgtagtgtgaagtactacctc

SEQ ID NO: 8320 - DNA, 25 bp, Artificial Sequence
  Synthetic Oligonucleotide
tagttacagcgtgaagtactacctc

SEQ ID NO: 8321 - DNA, 25 bp, Artificial Sequence
  Synthetic Oligonucleotide
ccgctgttacaggtgaaacggtctc

SEQ ID NO: 8322 - DNA, 25 bp, Artificial Sequence
  Synthetic Oligonucleotide
aggacttgccatcgtagaactgctg

SEQ ID NO: 8323 - DNA, 25 bp, Artificial Sequence
  Synthetic Oligonucleotide
cagcagttctacgatggcaagtcct

SEQ ID NO: 8324 - DNA, 25 bp, Artificial Sequence
  Synthetic Oligonucleotide
acgttactggaagtgctcgtctctc

SEQ ID NO: 8325 - DNA, 25 bp, Artificial Sequence
  Synthetic Oligonucleotide
agttgatggtaatcgaccgtttctc

SEQ ID NO: 8326 - DNA, 25 bp, Artificial Sequence
  Synthetic Oligonucleotide
cttgtgttctgttatgatcgtttgc

SEQ ID NO: 8327 - DNA, 25 bp, Artificial Sequence
  Synthetic Oligonucleotide
ttggtgtctacatataatctgctgc

SEQ ID NO: 8328 - DNA, 25 bp, Artificial Sequence
  Synthetic Oligonucleotide
ggtctacacacctctcgtgtcagtc

SEQ ID NO: 8329 - DNA, 25 bp, Artificial Sequence
  Synthetic Oligonucleotide
cggtgcacacacctagtcgagcagc

SEQ ID NO: 8330 - DNA, 25 bp, Artificial Sequence
  Synthetic Oligonucleotide
aggtgtagacaagcttccacgactc

SEQ ID NO: 8331 - DNA, 25 bp, Artificial Sequence
  Synthetic Oligonucleotide
gtaagtccaacagttcttccgactc

SEQ ID NO: 8332 - DNA, 25 bp, Artificial Sequence
  Synthetic Oligonucleotide
gaagaccgaacatttcctaccgctc

SEQ ID NO: 8333 - DNA, 25 bp, Artificial Sequence
  Synthetic Oligonucleotide
agagtagagacatttgctacatgtc

SEQ ID NO: 8334 - DNA, 25 bp, Artificial Sequence
  Synthetic Oligonucleotide
ccgagagattatccgtactactgtc

SEQ ID NO: 8335 - DNA, 25 bp, Artificial Sequence
  Synthetic Oligonucleotide
cttctaagctctacgtcgctctctc

SEQ ID NO: 8336 - DNA, 25 bp, Artificial Sequence
  Synthetic Oligonucleotide
tagatacaaggttgatcgtcctgtc

SEQ ID NO: 8337 - DNA, 25 bp, Artificial Sequence
  Synthetic Oligonucleotide
tgagtttaggtacgcttctgtagtc

SEQ ID NO: 8338 - DNA, 25 bp, Artificial Sequence
  Synthetic Oligonucleotide
tcctctgagagatcctctatgtatc

SEQ ID NO: 8339 - DNA, 25 bp, Artificial Sequence
  Synthetic Oligonucleotide
ttcttgacgagatccgacagagatc

SEQ ID NO: 8340 - DNA, 25 bp, Artificial Sequence
  Synthetic Oligonucleotide
tgtccacgacgttccgacagcagtc

SEQ ID NO: 8341 - DNA, 25 bp, Artificial Sequence
  Synthetic Oligonucleotide
ctggacgtcgactccgcagtctagc

SEQ ID NO: 8342 - DNA, 25 bp, Artificial Sequence
  Synthetic Oligonucleotide
ttggttgaccgtcacgacacgcggc

SEQ ID NO: 8343 - DNA, 25 bp, Artificial Sequence
  Synthetic Oligonucleotide
cgcgttcggacttcgtcggtacggc

SEQ ID NO: 8344 - DNA, 25 bp, Artificial Sequence
  Synthetic Oligonucleotide
cccgtttcagaccagcgagactctc

SEQ ID NO: 8345 - DNA, 25 bp, Artificial Sequence
  Synthetic Oligonucleotide
ggtcctttgttatgaccgagtatcc

SEQ ID NO: 8346 - DNA, 25 bp, Artificial Sequence
  Synthetic Oligonucleotide
tcgtttttagacttagggtcattcc

SEQ ID NO: 8347 - DNA, 25 bp, Artificial Sequence
  Synthetic Oligonucleotide
ttacactaacagtagggtcattctc

SEQ ID NO: 8348 - DNA, 25 bp, Artificial Sequence
  Synthetic Oligonucleotide
tgtaaagacggttggtgtcatatcc

SEQ ID NO: 8349 - DNA, 25 bp, Artificial Sequence
  Synthetic Oligonucleotide
taacgaatatgattctgtacgtacc

SEQ ID NO: 8350 - DNA, 25 bp, Artificial Sequence
  Synthetic Oligonucleotide
tcatcggtacaagaggtctgcgacc

SEQ ID NO: 8351 - DNA, 25 bp, Artificial Sequence
  Synthetic Oligonucleotide
atggacgcatgggtctagcgactcg

SEQ ID NO: 8352 - DNA, 25 bp, Artificial Sequence
  Synthetic Oligonucleotide
ttcgcctatgtcggtcgcgctaccg

SEQ ID NO: 8353 - DNA, 25 bp, Artificial Sequence
  Synthetic Oligonucleotide
ctatctacccttgtgtcgtgctcct

SEQ ID NO: 8354 - DNA, 25 bp, Artificial Sequence
  Synthetic Oligonucleotide
tttcacgacccttatgtccgcactc

SEQ ID NO: 8355 - DNA, 25 bp, Artificial Sequence
  Synthetic Oligonucleotide
gattcttagcacgttttctgtcccg

SEQ ID NO: 8356 - DNA, 25 bp, Artificial Sequence
  Synthetic Oligonucleotide
attttagcacgttgtttgagtcggc

SEQ ID NO: 8357 - DNA, 25 bp, Artificial Sequence
  Synthetic Oligonucleotide
ccttttgctactcaggttggcacgg

SEQ ID NO: 8358 - DNA, 25 bp, Artificial Sequence
  Synthetic Oligonucleotide
acctttaggtctatgttgtggcccg

SEQ ID NO: 8359 - DNA, 25 bp, Artificial Sequence
  Synthetic Oligonucleotide
atttatcatgtgatactttgccctg

SEQ ID NO: 8360 - DNA, 25 bp, Artificial Sequence
  Synthetic Oligonucleotide
tggtactgcgggtccactgctcccg

SEQ ID NO: 8361 - DNA, 25 bp, Artificial Sequence
  Synthetic Oligonucleotide
taagcgtaggaccggctcctggccc

SEQ ID NO: 8362 - DNA, 25 bp, Artificial Sequence
  Synthetic Oligonucleotide
gacagtgaaccaccaccgtcgggcc

SEQ ID NO: 8363 - DNA, 25 bp, Artificial Sequence
  Synthetic Oligonucleotide
atgagagtccatcaccgaccggacc

SEQ ID NO: 8364 - DNA, 25 bp, Artificial Sequence
  Synthetic Oligonucleotide
gaaagtcgcttgggtaccgtgactc

SEQ ID NO: 8365 - DNA, 25 bp, Artificial Sequence
  Synthetic Oligonucleotide
aaagagtatgtttgacttcggactc

SEQ ID NO: 8366 - DNA, 25 bp, Artificial Sequence
  Synthetic Oligonucleotide
acaagcgtgtgatgcttccgtcgtc

SEQ ID NO: 8367 - DNA, 25 bp, Artificial Sequence
  Synthetic Oligonucleotide
cttgagacctggtagccttctcgtc

SEQ ID NO: 8368 - DNA, 25 bp, Artificial Sequence
  Synthetic Oligonucleotide
cttggtccgtgacttccggtcggtc

SEQ ID NO: 8369 - DNA, 25 bp, Artificial Sequence
  Synthetic Oligonucleotide
tctgaacgggagcttacctaggagc

SEQ ID NO: 8370 - DNA, 25 bp, Artificial Sequence
  Synthetic Oligonucleotide
ttctgaatcggtctgacagggagtc

SEQ ID NO: 8371 - DNA, 25 bp, Artificial Sequence
  Synthetic Oligonucleotide
cccgtacatcgccttgacaaaagtc

SEQ ID NO: 8372 - DNA, 25 bp, Artificial Sequence
  Synthetic Oligonucleotide
agtacatccgtcactagaagaagtc

SEQ ID NO: 8373 - DNA, 25 bp, Artificial Sequence
  Synthetic Oligonucleotide
gatagtaagctcaagacgaagaatc

SEQ ID NO: 8374 - DNA, 25 bp, Artificial Sequence
  Synthetic Oligonucleotide
gaacttgaacttaaacgactcaagc

SEQ ID NO: 8375 - DNA, 25 bp, Artificial Sequence
  Synthetic Oligonucleotide
cactaagccttgtagctactagagc

SEQ ID NO: 8376 - DNA, 25 bp, Artificial Sequence
  Synthetic Oligonucleotide
cgtactagaggcgataactttgagg

SEQ ID NO: 8377 - DNA, 25 bp, Artificial Sequence
  Synthetic Oligonucleotide
actaagtggctaatcatgtcgagcg

SEQ ID NO: 8378 - DNA, 25 bp, Artificial Sequence
  Synthetic Oligonucleotide
aggtaaaggacctgtatcaggtccc

SEQ ID NO: 8379 - DNA, 25 bp, Artificial Sequence
  Synthetic Oligonucleotide
gacagttaggactggcacaggcccg

SEQ ID NO: 8380 - DNA, 25 bp, Artificial Sequence
  Synthetic Oligonucleotide
gacagttaggaaaaacacagacctg

SEQ ID NO: 8381 - DNA, 25 bp, Artificial Sequence
  Synthetic Oligonucleotide
cagaagttgcaagaaacaaagtcgt

SEQ ID NO: 8382 - DNA, 25 bp, Artificial Sequence
  Synthetic Oligonucleotide
aaaaggcacggcaatcacgagagcg

SEQ ID NO: 8383 - DNA, 25 bp, Artificial Sequence
  Synthetic Oligonucleotide
gaccggaacggcaactcctacagct

SEQ ID NO: 8384 - DNA, 25 bp, Artificial Sequence
  Synthetic Oligonucleotide
agagcgagacagggggtccgacctc

SEQ ID NO: 8385 - DNA, 25 bp, Artificial Sequence
  Synthetic Oligonucleotide
gacctaccgatggatgtaccgaccc

SEQ ID NO: 8386 - DNA, 25 bp, Artificial Sequence
  Synthetic Oligonucleotide
gacctatcgttggatgtaccgaccc

SEQ ID NO: 8387 - DNA, 25 bp, Artificial Sequence
  Synthetic Oligonucleotide
gaccactgttaggagaactactccc

SEQ ID NO: 8388 - DNA, 25 bp, Artificial Sequence
  Synthetic Oligonucleotide
attacaaaactgacggaagcctccc

SEQ ID NO: 8389 - DNA, 25 bp, Artificial Sequence
  Synthetic Oligonucleotide
ctacaagacccgacggggagccggc

SEQ ID NO: 8390 - DNA, 25 bp, Artificial Sequence
  Synthetic Oligonucleotide
cctagccgcctgagggtcctcggag

SEQ ID NO: 8391 - DNA, 25 bp, Artificial Sequence
  Synthetic Oligonucleotide
gctggttaccttatggtgatgaagt

SEQ ID NO: 8392 - DNA, 25 bp, Artificial Sequence
  Synthetic Oligonucleotide
gactaggcctccatatggaaggaat

SEQ ID NO: 8393 - DNA, 25 bp, Artificial Sequence
  Synthetic Oligonucleotide
ggtaggcctcaattgaagatgaggt

SEQ ID NO: 8394 - DNA, 25 bp, Artificial Sequence
  Synthetic Oligonucleotide
gtggaggtcccagtatcaaaaaggt

SEQ ID NO: 8395 - DNA, 25 bp, Artificial Sequence
  Synthetic Oligonucleotide
gtggaggttccagtaccagaaaggc

SEQ ID NO: 8396 - DNA, 25 bp, Artificial Sequence
  Synthetic Oligonucleotide
ttggagttcacaatatcagaaaggc

SEQ ID NO: 8397 - DNA, 25 bp, Artificial Sequence
  Synthetic Oligonucleotide
ttggagctcccagtaccagaacggc

SEQ ID NO: 8398 - DNA, 25 bp, Artificial Sequence
  Synthetic Oligonucleotide
gtggaggtcccagtaccagaacggc

SEQ ID NO: 8399 - DNA, 25 bp, Artificial Sequence
  Synthetic Oligonucleotide
gcgggacgtccatctgcagaaggtc

SEQ ID NO: 8400 - DNA, 25 bp, Artificial Sequence
  Synthetic Oligonucleotide
gtggcacttcgagttactgcagctc

SEQ ID NO: 8401 - DNA, 25 bp, Artificial Sequence
  Synthetic Oligonucleotide
aagtggcgtcttttttcttacatcc

SEQ ID NO: 8402 - DNA, 25 bp, Artificial Sequence
  Synthetic Oligonucleotide
gggacttatcagcttcatcgatctc

SEQ ID NO: 8403 - DNA, 25 bp, Artificial Sequence
  Synthetic Oligonucleotide
gggtcttgcagaatcccgtagtgtc

SEQ ID NO: 8404 - DNA, 25 bp, Artificial Sequence
  Synthetic Oligonucleotide
gctctgtcgccgtttcacagttctc

SEQ ID NO: 8405 - DNA, 25 bp, Artificial Sequence
  Synthetic Oligonucleotide
ccacgtccgccgaccgaagtcgtcc

SEQ ID NO: 8406 - DNA, 25 bp, Artificial Sequence
  Synthetic Oligonucleotide
acgtccgacgactacgcgacattgc

SEQ ID NO: 8407 - DNA, 25 bp, Artificial Sequence
  Synthetic Oligonucleotide
tacgtcggctaccccacgagttcgc

SEQ ID NO: 8408 - DNA, 25 bp, Artificial Sequence
  Synthetic Oligonucleotide
tgttcgtcctccagccgctattgtc

SEQ ID NO: 8409 - DNA, 25 bp, Artificial Sequence
  Synthetic Oligonucleotide
ctacggtcaccaagccggtctccgc

SEQ ID NO: 8410 - DNA, 25 bp, Artificial Sequence
  Synthetic Oligonucleotide
ctctgcgtaccaaggcggctctagc

SEQ ID NO: 8411 - DNA, 25 bp, Artificial Sequence
  Synthetic Oligonucleotide
gtacagcggcacctaccggctctgc

SEQ ID NO: 8412 - DNA, 25 bp, Artificial Sequence
  Synthetic Oligonucleotide
cgtcaggagctagtcctgcgcgagc

SEQ ID NO: 8413 - DNA, 25 bp, Artificial Sequence
  Synthetic Oligonucleotide
cagcagggtcaagcactgctacggc

SEQ ID NO: 8414 - DNA, 25 bp, Artificial Sequence
  Synthetic Oligonucleotide
gaacggcgtcagtcgctagcagtgc

SEQ ID NO: 8415 - DNA, 25 bp, Artificial Sequence
  Synthetic Oligonucleotide
cgaccgaggcagacacatcgcgcgc

SEQ ID NO: 8416 - DNA, 25 bp, Artificial Sequence
  Synthetic Oligonucleotide
gcgcgaccaactggtacatcgggtc

SEQ ID NO: 8417 - DNA, 25 bp, Artificial Sequence
  Synthetic Oligonucleotide
gtcgtcgtcgaaattacttggtacc

SEQ ID NO: 8418 - DNA, 25 bp, Artificial Sequence
  Synthetic Oligonucleotide
cggacgtcgctagcgttaccgggcc

SEQ ID NO: 8419 - DNA, 25 bp, Artificial Sequence
  Synthetic Oligonucleotide
cagcggcatctagctgagcggcggc

SEQ ID NO: 8420 - DNA, 25 bp, Artificial Sequence
  Synthetic Oligonucleotide
aggagctactccagcgcgagccggc

SEQ ID NO: 8421 - DNA, 25 bp, Artificial Sequence
  Synthetic Oligonucleotide
atggaccgctacaggccgccggtct

SEQ ID NO: 8422 - DNA, 25 bp, Artificial Sequence
  Synthetic Oligonucleotide
gagagaaccgaacgaggtccccgtc

SEQ ID NO: 8423 - DNA, 25 bp, Artificial Sequence
  Synthetic Oligonucleotide
agacgtaaggagcagaatccgcctc

SEQ ID NO: 8424 - DNA, 25 bp, Artificial Sequence
  Synthetic Oligonucleotide
agatgtggacgcgacgattggtcgc

SEQ ID NO: 8425 - DNA, 25 bp, Artificial Sequence
  Synthetic Oligonucleotide
gaggtgctacattagccgtggtcgc

SEQ ID NO: 8426 - DNA, 25 bp, Artificial Sequence
  Synthetic Oligonucleotide
aagtagtagtcaaagcgtggctcgc

SEQ ID NO: 8427 - DNA, 25 bp, Artificial Sequence
  Synthetic Oligonucleotide
cagtaactctcgatacggtcggggc

SEQ ID NO: 8428 - DNA, 25 bp, Artificial Sequence
  Synthetic Oligonucleotide
ctctcacactctgggtctcggggtc

SEQ ID NO: 8429 - DNA, 25 bp, Artificial Sequence
  Synthetic Oligonucleotide
tctaccgacaggtggacacgggagc

SEQ ID NO: 8430 - DNA, 25 bp, Artificial Sequence
  Synthetic Oligonucleotide
cctcgtagaggaaggctcatgacgg

SEQ ID NO: 8431 - DNA, 25 bp, Artificial Sequence
  Synthetic Oligonucleotide
tcccacgaggagaccccggtgtgcg

SEQ ID NO: 8432 - DNA, 25 bp, Artificial Sequence
  Synthetic Oligonucleotide
ccacttctgcggacacctgaggtgc

SEQ ID NO: 8433 - DNA, 25 bp, Artificial Sequence
  Synthetic Oligonucleotide
actcgttgctgctcttgcgttacgc

SEQ ID NO: 8434 - DNA, 25 bp, Artificial Sequence
  Synthetic Oligonucleotide
ttcgttgcagcgttacttgcgaacc

SEQ ID NO: 8435 - DNA, 25 bp, Artificial Sequence
  Synthetic Oligonucleotide
ttgtcaggcggaacttcgtgaacgc

SEQ ID NO: 8436 - DNA, 25 bp, Artificial Sequence
  Synthetic Oligonucleotide
ttgcaggaaccgattacgaaagcgt

SEQ ID NO: 8437 - DNA, 25 bp, Artificial Sequence
  Synthetic Oligonucleotide
tacgggaggaactggacctagaagc

SEQ ID NO: 8438 - DNA, 25 bp, Artificial Sequence
  Synthetic Oligonucleotide
ctacggagagaaggagacccggagc

SEQ ID NO: 8439 - DNA, 25 bp, Artificial Sequence
  Synthetic Oligonucleotide
gctcgtggaacagcggcaagaggtc

SEQ ID NO: 8440 - DNA, 25 bp, Artificial Sequence
  Synthetic Oligonucleotide
gcctggagccgtggaaacggacgtc

SEQ ID NO: 8441 - DNA, 25 bp, Artificial Sequence
  Synthetic Oligonucleotide
cccggaacgcgatcgatccgttcgc

SEQ ID NO: 8442 - DNA, 25 bp, Artificial Sequence
  Synthetic Oligonucleotide
acgtggaagtacttgagcggctcgc

SEQ ID NO: 8443 - DNA, 25 bp, Artificial Sequence
  Synthetic Oligonucleotide
tacaggggagatagaggtacctgtc

SEQ ID NO: 8444 - DNA, 25 bp, Artificial Sequence
  Synthetic Oligonucleotide
catctagagtctcaggtacgactgc

SEQ ID NO: 8445 - DNA, 25 bp, Artificial Sequence
  Synthetic Oligonucleotide
tagttgtagtgtcaagtactacctc

SEQ ID NO: 8446 - DNA, 25 bp, Artificial Sequence
  Synthetic Oligonucleotide
tagttacagcgtcaagtactacctc

SEQ ID NO: 8447 - DNA, 25 bp, Artificial Sequence
  Synthetic Oligonucleotide
ccgctgttacagctgaaacggtctc

SEQ ID NO: 8448 - DNA, 25 bp, Artificial Sequence
  Synthetic Oligonucleotide
cagcagttctacgatggcaagtcct

SEQ ID NO: 8449 - DNA, 25 bp, Artificial Sequence
  Synthetic Oligonucleotide
aggacttgccatcgtagaactgctg

SEQ ID NO: 8450 - DNA, 25 bp, Artificial Sequence
  Synthetic Oligonucleotide
gagccactgaaattacgtcctccct

SEQ ID NO: 8451 - DNA, 25 bp, Artificial Sequence
  Synthetic Oligonucleotide
agtctctcttgaaggtctccccgtc

SEQ ID NO: 8452 - DNA, 25 bp, Artificial Sequence
  Synthetic Oligonucleotide
ggtgtcgttctcactggcctccgtc

SEQ ID NO: 8453 - DNA, 25 bp, Artificial Sequence
  Synthetic Oligonucleotide
gtcgccttcacaatggacaactgcg

SEQ ID NO: 8454 - DNA, 25 bp, Artificial Sequence
  Synthetic Oligonucleotide
tcgcggccacaaactagacaatgtc

SEQ ID NO: 8455 - DNA, 25 bp, Artificial Sequence
  Synthetic Oligonucleotide
gctggagctcccactaccagaacgg

SEQ ID NO: 8456 - DNA, 25 bp, Artificial Sequence
  Synthetic Oligonucleotide
ggcaaggcccctactagtcaaccag

SEQ ID NO: 8457 - DNA, 25 bp, Artificial Sequence
  Synthetic Oligonucleotide
agctcccgtctagtatcaactactg

SEQ ID NO: 8458 - DNA, 25 bp, Artificial Sequence
  Synthetic Oligonucleotide
gccgacactaacgagtcatactacc

SEQ ID NO: 8459 - DNA, 25 bp, Artificial Sequence
  Synthetic Oligonucleotide
cagaaccagatggctgctatctacc

SEQ ID NO: 8460 - DNA, 25 bp, Artificial Sequence
  Synthetic Oligonucleotide
cgactggacgtggactgctcctagc

SEQ ID NO: 8461 - DNA, 25 bp, Artificial Sequence
  Synthetic Oligonucleotide
gtctgtgaggtctggtcccgtagtc

SEQ ID NO: 8462 - DNA, 25 bp, Artificial Sequence
  Synthetic Oligonucleotide
gttgtagagtgctgtgctcgactgc

SEQ ID NO: 8463 - DNA, 25 bp, Artificial Sequence
  Synthetic Oligonucleotide
gtgtagacggtcacggacgtttgtc

SEQ ID NO: 8464 - DNA, 25 bp, Artificial Sequence
  Synthetic Oligonucleotide
tgttaacatctttagacaagtagtc

SEQ ID NO: 8465 - DNA, 25 bp, Artificial Sequence
  Synthetic Oligonucleotide
cgtcgagaactctaacaaacgtgtc

SEQ ID NO: 8466 - DNA, 25 bp, Artificial Sequence
  Synthetic Oligonucleotide
ctcgactaccgcttctcgtaaaggc

SEQ ID NO: 8467 - DNA, 25 bp, Artificial Sequence
  Synthetic Oligonucleotide
ctacgcaccgtggctacggaaagtc

SEQ ID NO: 8468 - DNA, 25 bp, Artificial Sequence
  Synthetic Oligonucleotide
gtctgtgtacgtccacggaaacgtc

SEQ ID NO: 8469 - DNA, 25 bp, Artificial Sequence
  Synthetic Oligonucleotide
actctgttcgtatacgatgaccgtc

SEQ ID NO: 8470 - DNA, 25 bp, Artificial Sequence
  Synthetic Oligonucleotide
ccgtcgtgttaacgaaggacgcgtc

SEQ ID NO: 8471 - DNA, 25 bp, Artificial Sequence
  Synthetic Oligonucleotide
gttcgtcgtttttcgattagagtcc

SEQ ID NO: 8472 - DNA, 25 bp, Artificial Sequence
  Synthetic Oligonucleotide
atcaagtttaacctatagtagtcgc

SEQ ID NO: 8473 - DNA, 25 bp, Artificial Sequence
  Synthetic Oligonucleotide
tctaacaaacgtgtccatataatcc

SEQ ID NO: 8474 - DNA, 25 bp, Artificial Sequence
  Synthetic Oligonucleotide
ttctgaagaactgtgttggtattcc

SEQ ID NO: 8475 - DNA, 25 bp, Artificial Sequence
  Synthetic Oligonucleotide
ttcaatatagcagttatagctgccc

SEQ ID NO: 8476 - DNA, 25 bp, Artificial Sequence
  Synthetic Oligonucleotide
attaagttagccatcatcgctgccc

SEQ ID NO: 8477 - DNA, 25 bp, Artificial Sequence
  Synthetic Oligonucleotide
agtaagttagccatcctcgctgccc

SEQ ID NO: 8478 - DNA, 25 bp, Artificial Sequence
  Synthetic Oligonucleotide
ggtaagttagccatcctcgctgccc

SEQ ID NO: 8479 - DNA, 25 bp, Artificial Sequence
  Synthetic Oligonucleotide
ggtaagttagccatcctcgctgccc

SEQ ID NO: 8480 - DNA, 25 bp, Artificial Sequence
  Synthetic Oligonucleotide
ggtaagttagccatcctcgctgccc

SEQ ID NO: 8481 - DNA, 25 bp, Artificial Sequence
  Synthetic Oligonucleotide
ggtaagttagccatcctcgctgccc

SEQ ID NO: 8482 - DNA, 25 bp, Artificial Sequence
  Synthetic Oligonucleotide
gtctaggtttccttgcctgcgtccc

SEQ ID NO: 8483 - DNA, 25 bp, Artificial Sequence
  Synthetic Oligonucleotide
tctgtagttgccaaccctgtgcctt

SEQ ID NO: 8484 - DNA, 25 bp, Artificial Sequence
  Synthetic Oligonucleotide
cttgtattgtccactttgtgcttag

SEQ ID NO: 8485 - DNA, 25 bp, Artificial Sequence
  Synthetic Oligonucleotide
actttatcttggactttggcatacg

SEQ ID NO: 8486 - DNA, 25 bp, Artificial Sequence
  Synthetic Oligonucleotide
ctcggttttggttatttggttcacg

SEQ ID NO: 8487 - DNA, 25 bp, Artificial Sequence
  Synthetic Oligonucleotide
ctcgaacaggggacgtttggttccg

SEQ ID NO: 8488 - DNA, 25 bp, Artificial Sequence
  Synthetic Oligonucleotide
taatgggcccggacagccggttccg

SEQ ID NO: 8489 - DNA, 25 bp, Artificial Sequence
  Synthetic Oligonucleotide
taatgggcccggacagcctggtccg

SEQ ID NO: 8490 - DNA, 25 bp, Artificial Sequence
  Synthetic Oligonucleotide
aaggaaccccggagccgacggtccg

SEQ ID NO: 8491 - DNA, 25 bp, Artificial Sequence
  Synthetic Oligonucleotide
gatccgttcgcgagatggtgactcg

SEQ ID NO: 8492 - DNA, 25 bp, Artificial Sequence
  Synthetic Oligonucleotide
gacccgatgtacgagttggtcgcgc

SEQ ID NO: 8493 - DNA, 25 bp, Artificial Sequence
  Synthetic Oligonucleotide
cggtcccctagagagggtcgtcgcc

SEQ ID NO: 8494 - DNA, 25 bp, Artificial Sequence
  Synthetic Oligonucleotide
ctgtgcccgtgacacaggtctggtc

SEQ ID NO: 8495 - DNA, 25 bp, Artificial Sequence
  Synthetic Oligonucleotide
ctgtcgccgattcacagttctcggc

SEQ ID NO: 8496 - DNA, 25 bp, Artificial Sequence
  Synthetic Oligonucleotide
tggacggacatagctacgttgtggc

SEQ ID NO: 8497 - DNA, 25 bp, Artificial Sequence
  Synthetic Oligonucleotide
tcaagaaggaaacacttgtacacct

SEQ ID NO: 8498 - DNA, 25 bp, Artificial Sequence
  Synthetic Oligonucleotide
tagtaggtgccaagatatgacaact

SEQ ID NO: 8499 - DNA, 25 bp, Artificial Sequence
  Synthetic Oligonucleotide
cattaggacccaagatgagacgacc

SEQ ID NO: 8500 - DNA, 25 bp, Artificial Sequence
  Synthetic Oligonucleotide
cggtaggactccatagagtaaagcc

SEQ ID NO: 8501 - DNA, 25 bp, Artificial Sequence
  Synthetic Oligonucleotide
ggtagtagtctttctaaacaagagc

SEQ ID NO: 8502 - DNA, 25 bp, Artificial Sequence
  Synthetic Oligonucleotide
gttaggttgtgaaccacttaagacg

SEQ ID NO: 8503 - DNA, 25 bp, Artificial Sequence
  Synthetic Oligonucleotide
gttaatccgtgtcctcatctcaacg

SEQ ID NO: 8504 - DNA, 25 bp, Artificial Sequence
  Synthetic Oligonucleotide
ggtcaaacgccttgtcaacgtccag

SEQ ID NO: 8505 - DNA, 25 bp, Artificial Sequence
  Synthetic Oligonucleotide
taatcctaacccattaaacgcgcgg

SEQ ID NO: 8506 - DNA, 25 bp, Artificial Sequence
  Synthetic Oligonucleotide
acctacgtccctactacaagacccg

SEQ ID NO: 8507 - DNA, 25 bp, Artificial Sequence
  Synthetic Oligonucleotide
gttacttcgtgtgttcaaacaaacg

SEQ ID NO: 8508 - DNA, 25 bp, Artificial Sequence
  Synthetic Oligonucleotide
cccggatctcgagttaaaacttaag

SEQ ID NO: 8509 - DNA, 25 bp, Artificial Sequence
  Synthetic Oligonucleotide
agtcgattcgggtacatcatgaggt

SEQ ID NO: 8510 - DNA, 25 bp, Artificial Sequence
  Synthetic Oligonucleotide
taaacttctggacagcggagtactt

SEQ ID NO: 8511 - DNA, 25 bp, Artificial Sequence
  Synthetic Oligonucleotide
ttccaatctgagcgaccgaggcagt

SEQ ID NO: 8512 - DNA, 25 bp, Artificial Sequence
  Synthetic Oligonucleotide
ttccaacttgagcaagccacgcact

SEQ ID NO: 8513 - DNA, 25 bp, Artificial Sequence
  Synthetic Oligonucleotide
tttaacgctaactaagaagccgact

SEQ ID NO: 8514 - DNA, 25 bp, Artificial Sequence
  Synthetic Oligonucleotide
gtataaaccgtcgaaagaggtccgc

SEQ ID NO: 8515 - DNA, 25 bp, Artificial Sequence
  Synthetic Oligonucleotide
tacaactaaccgtgcgaaaggccgc

SEQ ID NO: 8516 - DNA, 25 bp, Artificial Sequence
  Synthetic Oligonucleotide
actacaagacctctcggggcgccgg

SEQ ID NO: 8517 - DNA, 25 bp, Artificial Sequence
  Synthetic Oligonucleotide
cacaagctactccttgctggtgcgg

SEQ ID NO: 8518 - DNA, 25 bp, Artificial Sequence
  Synthetic Oligonucleotide
ccacaggcttcgaagctggagctct

SEQ ID NO: 8519 - DNA, 25 bp, Artificial Sequence
  Synthetic Oligonucleotide
cccaccgatgtggacgccgagaggc

SEQ ID NO: 8520 - DNA, 25 bp, Artificial Sequence
  Synthetic Oligonucleotide
ccgctctgtcgccgactcagagtgc

SEQ ID NO: 8521 - DNA, 25 bp, Artificial Sequence
  Synthetic Oligonucleotide
agtctgctctagcccgcgcaagtcc

SEQ ID NO: 8522 - DNA, 25 bp, Artificial Sequence
  Synthetic Oligonucleotide
gggagattcttcgaccggcacctcc

SEQ ID NO: 8523 - DNA, 25 bp, Artificial Sequence
  Synthetic Oligonucleotide
ggagggctcatcgaccctaatgtcc

SEQ ID NO: 8524 - DNA, 25 bp, Artificial Sequence
  Synthetic Oligonucleotide
ggagggtttcacgaccctaatgtcc

SEQ ID NO: 8525 - DNA, 25 bp, Artificial Sequence
  Synthetic Oligonucleotide
ggtaatctacgcgccgctagttggc

SEQ ID NO: 8526 - DNA, 25 bp, Artificial Sequence
  Synthetic Oligonucleotide
ggtcatctgaggtgctgtatgagtc

SEQ ID NO: 8527 - DNA, 25 bp, Artificial Sequence
  Synthetic Oligonucleotide
aggccacctgagttgctgtatcagc

SEQ ID NO: 8528 - DNA, 25 bp, Artificial Sequence
  Synthetic Oligonucleotide
ctgtagcttcctagtttttcgttgc

SEQ ID NO: 8529 - DNA, 25 bp, Artificial Sequence
  Synthetic Oligonucleotide
ttacctacctttgtatattcgttgg

SEQ ID NO: 8530 - DNA, 25 bp, Artificial Sequence
  Synthetic Oligonucleotide
aatctactgctccgtaaaccgatgg

SEQ ID NO: 8531 - DNA, 25 bp, Artificial Sequence
  Synthetic Oligonucleotide
cgtcctacgcttacatcacgactgc

SEQ ID NO: 8532 - DNA, 25 bp, Artificial Sequence
  Synthetic Oligonucleotide
tgctacggtttcaacagtacctact

SEQ ID NO: 8533 - DNA, 25 bp, Artificial Sequence
  Synthetic Oligonucleotide
tgacggtacgtgctacaagagaccc

SEQ ID NO: 8534 - DNA, 25 bp, Artificial Sequence
  Synthetic Oligonucleotide
tgtcggtacgtcgtggacagagtgc

SEQ ID NO: 8535 - DNA, 25 bp, Artificial Sequence
  Synthetic Oligonucleotide
ttgtacctacgatgtatacgaatgc

SEQ ID NO: 8536 - DNA, 25 bp, Artificial Sequence
  Synthetic Oligonucleotide
tgtcaccactaatgacgtcagtagc

SEQ ID NO: 8537 - DNA, 25 bp, Artificial Sequence
  Synthetic Oligonucleotide
caagcttacccagcagcggcggtgc

SEQ ID NO: 8538 - DNA, 25 bp, Artificial Sequence
  Synthetic Oligonucleotide
ctgctcttagcaacccggacgaggc

SEQ ID NO: 8539 - DNA, 25 bp, Artificial Sequence
  Synthetic Oligonucleotide
gcttgtgcaaccagtaccagacgtc

SEQ ID NO: 8540 - DNA, 25 bp, Artificial Sequence
  Synthetic Oligonucleotide
tagacgtacaacgagtatcacacgc

SEQ ID NO: 8541 - DNA, 25 bp, Artificial Sequence
  Synthetic Oligonucleotide
ccagagcagtaggagtacgtccggc

SEQ ID NO: 8542 - DNA, 25 bp, Artificial Sequence
  Synthetic Oligonucleotide
ccacggacacggttactagtccggc

SEQ ID NO: 8543 - DNA, 25 bp, Artificial Sequence
  Synthetic Oligonucleotide
cgcacggacttgttcgtaaccgccg

SEQ ID NO: 8544 - DNA, 25 bp, Artificial Sequence
  Synthetic Oligonucleotide
taggtaggcttctgtagtcctagcc

SEQ ID NO: 8545 - DNA, 25 bp, Artificial Sequence
  Synthetic Oligonucleotide
ccgagtgaagctcgtgtaggccgcc

SEQ ID NO: 8546 - DNA, 25 bp, Artificial Sequence
  Synthetic Oligonucleotide
accagtcgggctaggcagccgagct

SEQ ID NO: 8547 - DNA, 25 bp, Artificial Sequence
  Synthetic Oligonucleotide
acttgcggcgctagagccatcccgt

SEQ ID NO: 8548 - DNA, 25 bp, Artificial Sequence
  Synthetic Oligonucleotide
gttggagacgaccaggcctccctat

SEQ ID NO: 8549 - DNA, 25 bp, Artificial Sequence
  Synthetic Oligonucleotide
gtagtgtgggaccacggatcccgcc

SEQ ID NO: 8550 - DNA, 25 bp, Artificial Sequence
  Synthetic Oligonucleotide
tggtaggttagccatcatcgctgcc

SEQ ID NO: 8551 - DNA, 25 bp, Artificial Sequence
  Synthetic Oligonucleotide
ggaggtgccacgttgttcgatcgcc

SEQ ID NO: 8552 - DNA, 25 bp, Artificial Sequence
  Synthetic Oligonucleotide
ggactctgcgtcgtggttcacctcc

SEQ ID NO: 8553 - DNA, 25 bp, Artificial Sequence
  Synthetic Oligonucleotide
aggtccctgctcgaacttcgccggc

SEQ ID NO: 8554 - DNA, 25 bp, Artificial Sequence
  Synthetic Oligonucleotide
gcgctgctgcacgaacctcaggagc

SEQ ID NO: 8555 - DNA, 25 bp, Artificial Sequence
  Synthetic Oligonucleotide
gactctcctggctaagacccagagc

SEQ ID NO: 8556 - DNA, 25 bp, Artificial Sequence
  Synthetic Oligonucleotide
ggcttttgccactggccgaagagcg

SEQ ID NO: 8557 - DNA, 25 bp, Artificial Sequence
  Synthetic Oligonucleotide
cgtctaagtccatgcccaagtagtc

SEQ ID NO: 8558 - DNA, 25 bp, Artificial Sequence
  Synthetic Oligonucleotide
tacattaattcaagcccaggttacg

SEQ ID NO: 8559 - DNA, 25 bp, Artificial Sequence
  Synthetic Oligonucleotide
agtttaattcggcgtccgaggtgag

SEQ ID NO: 8560 - DNA, 25 bp, Artificial Sequence
  Synthetic Oligonucleotide
gtttcatgcaggtaggagttcgacg

SEQ ID NO: 8561 - DNA, 25 bp, Artificial Sequence
  Synthetic Oligonucleotide
ctcccatgccggtaggaggtcgacg

SEQ ID NO: 8562 - DNA, 25 bp, Artificial Sequence
  Synthetic Oligonucleotide
tcgcatcggctgtagcgacagcgcg

SEQ ID NO: 8563 - DNA, 25 bp, Artificial Sequence
  Synthetic Oligonucleotide
atcagcaggcgctgctgcacgaacc

SEQ ID NO: 8564 - DNA, 25 bp, Artificial Sequence
  Synthetic Oligonucleotide
cgggaggtcaggctgctcgacacgc

SEQ ID NO: 8565 - DNA, 25 bp, Artificial Sequence
  Synthetic Oligonucleotide
ccggtagagaacgagcttcagatcc

SEQ ID NO: 8566 - DNA, 25 bp, Artificial Sequence
  Synthetic Oligonucleotide
cgcttaggccggaacgtgtaaggcc

SEQ ID NO: 8567 - DNA, 25 bp, Artificial Sequence
  Synthetic Oligonucleotide
cttcgagccgagacggtaagcgcgc

SEQ ID NO: 8568 - DNA, 25 bp, Artificial Sequence
  Synthetic Oligonucleotide
gggtgtgtccaacacgaacgctcgc

SEQ ID NO: 8569 - DNA, 25 bp, Artificial Sequence
  Synthetic Oligonucleotide
gggtgtgccgttcgaagtacttgtc

SEQ ID NO: 8570 - DNA, 25 bp, Artificial Sequence
  Synthetic Oligonucleotide
cactctgtcccatcgaatagttgtc

SEQ ID NO: 8571 - DNA, 25 bp, Artificial Sequence
  Synthetic Oligonucleotide
agggtcttgagtgagacatctagtc

SEQ ID NO: 8572 - DNA, 25 bp, Artificial Sequence
  Synthetic Oligonucleotide
gaagggtgacaaatagacattacgc

SEQ ID NO: 8573 - DNA, 25 bp, Artificial Sequence
  Synthetic Oligonucleotide
gagtcgggtgccttagagcagtccc

SEQ ID NO: 8574 - DNA, 25 bp, Artificial Sequence
  Synthetic Oligonucleotide
aggacttgccatcgtagaactgctg

SEQ ID NO: 8575 - DNA, 25 bp, Artificial Sequence
  Synthetic Oligonucleotide
cagcagttctacgatggcaagtcct

SEQ ID NO: 8576 - DNA, 25 bp, Artificial Sequence
  Synthetic Oligonucleotide
gagccactgaaaatacgtcctccct

SEQ ID NO: 8577 - DNA, 25 bp, Artificial Sequence
  Synthetic Oligonucleotide
agtctctcttgatggtctccccgtc

SEQ ID NO: 8578 - DNA, 25 bp, Artificial Sequence
  Synthetic Oligonucleotide
ggtgtcgttctctctggcctccgtc

SEQ ID NO: 8579 - DNA, 25 bp, Artificial Sequence
  Synthetic Oligonucleotide
gtcgccttcacattggacaactgcg

SEQ ID NO: 8580 - DNA, 25 bp, Artificial Sequence
  Synthetic Oligonucleotide
tcgcggccacaatctagacaatgtc

SEQ ID NO: 8581 - DNA, 25 bp, Artificial Sequence
  Synthetic Oligonucleotide
gctggagctccctctaccagaacgg

SEQ ID NO: 8582 - DNA, 25 bp, Artificial Sequence
  Synthetic Oligonucleotide
ggcaaggccccttctagtcaaccag

SEQ ID NO: 8583 - DNA, 25 bp, Artificial Sequence
  Synthetic Oligonucleotide
agctcccgtctactatcaactactg

SEQ ID NO: 8584 - DNA, 25 bp, Artificial Sequence
  Synthetic Oligonucleotide
gccgacactaaccagtcatactacc

SEQ ID NO: 8585 - DNA, 25 bp, Artificial Sequence
  Synthetic Oligonucleotide
cagaaccagatgcctgctatctacc

SEQ ID NO: 8586 - DNA, 25 bp, Artificial Sequence
  Synthetic Oligonucleotide
cgactggacgtgcactgctcctagc

SEQ ID NO: 8587 - DNA, 25 bp, Artificial Sequence
  Synthetic Oligonucleotide
gtctgtgaggtcaggtcccgtagtc

SEQ ID NO: 8588 - DNA, 25 bp, Artificial Sequence
  Synthetic Oligonucleotide
gttgtagagtgcagtgctcgactgc

SEQ ID NO: 8589 - DNA, 25 bp, Artificial Sequence
  Synthetic Oligonucleotide
gtgtagacggtctcggacgtttgtc

SEQ ID NO: 8590 - DNA, 25 bp, Artificial Sequence
  Synthetic Oligonucleotide
tgttaacatcttaagacaagtagtc

SEQ ID NO: 8591 - DNA, 25 bp, Artificial Sequence
  Synthetic Oligonucleotide
cgtcgagaactcaaacaaacgtgtc

SEQ ID NO: 8592 - DNA, 25 bp, Artificial Sequence
  Synthetic Oligonucleotide
ctcgactaccgcatctcgtaaaggc

SEQ ID NO: 8593 - DNA, 25 bp, Artificial Sequence
  Synthetic Oligonucleotide
ctacgcaccgtgcctacggaaagtc

SEQ ID NO: 8594 - DNA, 25 bp, Artificial Sequence
  Synthetic Oligonucleotide
gtctgtgtacgtgcacggaaacgtc

SEQ ID NO: 8595 - DNA, 25 bp, Artificial Sequence
  Synthetic Oligonucleotide
actctgttcgtaaacgatgaccgtc

SEQ ID NO: 8596 - DNA, 25 bp, Artificial Sequence
  Synthetic Oligonucleotide
ccgtcgtgttaaggaaggacgcgtc

SEQ ID NO: 8597 - DNA, 25 bp, Artificial Sequence
  Synthetic Oligonucleotide
gttcgtcgttttacgattagagtcc

SEQ ID NO: 8598 - DNA, 25 bp, Artificial Sequence
  Synthetic Oligonucleotide
atcaagtttaacgtatagtagtcgc

SEQ ID NO: 8599 - DNA, 25 bp, Artificial Sequence
  Synthetic Oligonucleotide
tctaacaaacgtctccatataatcc

SEQ ID NO: 8600 - DNA, 25 bp, Artificial Sequence
  Synthetic Oligonucleotide
ttctgaagaactctgttggtattcc

SEQ ID NO: 8601 - DNA, 25 bp, Artificial Sequence
  Synthetic Oligonucleotide
ttcaatatagcacttatagctgccc

SEQ ID NO: 8602 - DNA, 25 bp, Artificial Sequence
  Synthetic Oligonucleotide
attaagttagccttcatcgctgccc

SEQ ID NO: 8603 - DNA, 25 bp, Artificial Sequence
  Synthetic Oligonucleotide
agtaagttagccttcctcgctgccc

SEQ ID NO: 8604 - DNA, 25 bp, Artificial Sequence
  Synthetic Oligonucleotide
ggtaagttagccttcctcgctgccc

SEQ ID NO: 8605 - DNA, 25 bp, Artificial Sequence
  Synthetic Oligonucleotide
ggtaagttagccttcctcgctgccc

SEQ ID NO: 8606 - DNA, 25 bp, Artificial Sequence
  Synthetic Oligonucleotide
ggtaagttagccttcctcgctgccc

SEQ ID NO: 8607 - DNA, 25 bp, Artificial Sequence
  Synthetic Oligonucleotide
ggtaagttagccttcctcgctgccc

SEQ ID NO: 8608 - DNA, 25 bp, Artificial Sequence
  Synthetic Oligonucleotide
gtctaggtttccatgcctgcgtccc

SEQ ID NO: 8609 - DNA, 25 bp, Artificial Sequence
  Synthetic Oligonucleotide
tctgtagttgcctaccctgtgcctt

SEQ ID NO: 8610 - DNA, 25 bp, Artificial Sequence
  Synthetic Oligonucleotide
cttgtattgtcctctttgtgcttag

SEQ ID NO: 8611 - DNA, 25 bp, Artificial Sequence
  Synthetic Oligonucleotide
actttatcttggtctttggcatacg

SEQ ID NO: 8612 - DNA, 25 bp, Artificial Sequence
  Synthetic Oligonucleotide
ctcggttttggtaatttggttcacg

SEQ ID NO: 8613 - DNA, 25 bp, Artificial Sequence
  Synthetic Oligonucleotide
ctcgaacaggggtcgtttggttccg

SEQ ID NO: 8614 - DNA, 25 bp, Artificial Sequence
  Synthetic Oligonucleotide
taatgggcccggtcagccggttccg

SEQ ID NO: 8615 - DNA, 25 bp, Artificial Sequence
  Synthetic Oligonucleotide
taatgggcccggtcagcctggtccg

SEQ ID NO: 8616 - DNA, 25 bp, Artificial Sequence
  Synthetic Oligonucleotide
aaggaaccccggtgccgacggtccg

SEQ ID NO: 8617 - DNA, 25 bp, Artificial Sequence
  Synthetic Oligonucleotide
gatccgttcgcgtgatggtgactcg

SEQ ID NO: 8618 - DNA, 25 bp, Artificial Sequence
  Synthetic Oligonucleotide
gacccgatgtaccagttggtcgcgc

SEQ ID NO: 8619 - DNA, 25 bp, Artificial Sequence
  Synthetic Oligonucleotide
cggtcccctagacagggtcgtcgcc

SEQ ID NO: 8620 - DNA, 25 bp, Artificial Sequence
  Synthetic Oligonucleotide
ctgtgcccgtgagacaggtctggtc

SEQ ID NO: 8621 - DNA, 25 bp, Artificial Sequence
  Synthetic Oligonucleotide
ctgtcgccgattgacagttctcggc

SEQ ID NO: 8622 - DNA, 25 bp, Artificial Sequence
  Synthetic Oligonucleotide
tggacggacatacctacgttgtggc

SEQ ID NO: 8623 - DNA, 25 bp, Artificial Sequence
  Synthetic Oligonucleotide
tcaagaaggaaagacttgtacacct

SEQ ID NO: 8624 - DNA, 25 bp, Artificial Sequence
  Synthetic Oligonucleotide
tagtaggtgccatgatatgacaact

SEQ ID NO: 8625 - DNA, 25 bp, Artificial Sequence
  Synthetic Oligonucleotide
cattaggacccatgatgagacgacc

SEQ ID NO: 8626 - DNA, 25 bp, Artificial Sequence
  Synthetic Oligonucleotide
cggtaggactccttagagtaaagcc

SEQ ID NO: 8627 - DNA, 25 bp, Artificial Sequence
  Synthetic Oligonucleotide
ggtagtagtcttactaaacaagagc

SEQ ID NO: 8628 - DNA, 25 bp, Artificial Sequence
  Synthetic Oligonucleotide
gttaggttgtgatccacttaagacg

SEQ ID NO: 8629 - DNA, 25 bp, Artificial Sequence
  Synthetic Oligonucleotide
gttaatccgtgtgctcatctcaacg

SEQ ID NO: 8630 - DNA, 25 bp, Artificial Sequence
  Synthetic Oligonucleotide
ggtcaaacgcctagtcaacgtccag

SEQ ID NO: 8631 - DNA, 25 bp, Artificial Sequence
  Synthetic Oligonucleotide
taatcctaaccctttaaacgcgcgg

SEQ ID NO: 8632 - DNA, 25 bp, Artificial Sequence
  Synthetic Oligonucleotide
acctacgtcccttctacaagacccg

SEQ ID NO: 8633 - DNA, 25 bp, Artificial Sequence
  Synthetic Oligonucleotide
gttacttcgtgtcttcaaacaaacg

SEQ ID NO: 8634 - DNA, 25 bp, Artificial Sequence
  Synthetic Oligonucleotide
cccggatctcgacttaaaacttaag

SEQ ID NO: 8635 - DNA, 25 bp, Artificial Sequence
  Synthetic Oligonucleotide
agtcgattcgggaacatcatgaggt

SEQ ID NO: 8636 - DNA, 25 bp, Artificial Sequence
  Synthetic Oligonucleotide
taaacttctggagagcggagtactt

SEQ ID NO: 8637 - DNA, 25 bp, Artificial Sequence
  Synthetic Oligonucleotide
ttccaatctgagggaccgaggcagt

SEQ ID NO: 8638 - DNA, 25 bp, Artificial Sequence
  Synthetic Oligonucleotide
ttccaacttgaggaagccacgcact

SEQ ID NO: 8639 - DNA, 25 bp, Artificial Sequence
  Synthetic Oligonucleotide
tttaacgctaacaaagaagccgact

SEQ ID NO: 8640 - DNA, 25 bp, Artificial Sequence
  Synthetic Oligonucleotide
gtataaaccgtccaaagaggtccgc

SEQ ID NO: 8641 - DNA, 25 bp, Artificial Sequence
  Synthetic Oligonucleotide
tacaactaaccgagcgaaaggccgc

SEQ ID NO: 8642 - DNA, 25 bp, Artificial Sequence
  Synthetic Oligonucleotide
actacaagacctgtcggggcgccgg

SEQ ID NO: 8643 - DNA, 25 bp, Artificial Sequence
  Synthetic Oligonucleotide
cacaagctactcgttgctggtgcgg

SEQ ID NO: 8644 - DNA, 25 bp, Artificial Sequence
  Synthetic Oligonucleotide
ccacaggcttcgtagctggagctct

SEQ ID NO: 8645 - DNA, 25 bp, Artificial Sequence
  Synthetic Oligonucleotide
cccaccgatgtgcacgccgagaggc

SEQ ID NO: 8646 - DNA, 25 bp, Artificial Sequence
  Synthetic Oligonucleotide
ccgctctgtcgcggactcagagtgc

SEQ ID NO: 8647 - DNA, 25 bp, Artificial Sequence
  Synthetic Oligonucleotide
agtctgctctaggccgcgcaagtcc

SEQ ID NO: 8648 - DNA, 25 bp, Artificial Sequence
  Synthetic Oligonucleotide
gggagattcttccaccggcacctcc

SEQ ID NO: 8649 - DNA, 25 bp, Artificial Sequence
  Synthetic Oligonucleotide
ggagggctcatccaccctaatgtcc

SEQ ID NO: 8650 - DNA, 25 bp, Artificial Sequence
  Synthetic Oligonucleotide
ggagggtttcaccaccctaatgtcc

SEQ ID NO: 8651 - DNA, 25 bp, Artificial Sequence
  Synthetic Oligonucleotide
ggtaatctacgccccgctagttggc

SEQ ID NO: 8652 - DNA, 25 bp, Artificial Sequence
  Synthetic Oligonucleotide
ggtcatctgaggagctgtatgagtc

SEQ ID NO: 8653 - DNA, 25 bp, Artificial Sequence
  Synthetic Oligonucleotide
aggccacctgagatgctgtatcagc

SEQ ID NO: 8654 - DNA, 25 bp, Artificial Sequence
  Synthetic Oligonucleotide
ctgtagcttccttgtttttcgttgc

SEQ ID NO: 8655 - DNA, 25 bp, Artificial Sequence
  Synthetic Oligonucleotide
ttacctacctttctatattcgttgg

SEQ ID NO: 8656 - DNA, 25 bp, Artificial Sequence
  Synthetic Oligonucleotide
aatctactgctcggtaaaccgatgg

SEQ ID NO: 8657 - DNA, 25 bp, Artificial Sequence
  Synthetic Oligonucleotide
cgtcctacgctttcatcacgactgc

SEQ ID NO: 8658 - DNA, 25 bp, Artificial Sequence
  Synthetic Oligonucleotide
tgctacggtttctacagtacctact

SEQ ID NO: 8659 - DNA, 25 bp, Artificial Sequence
  Synthetic Oligonucleotide
tgacggtacgtggtacaagagaccc

SEQ ID NO: 8660 - DNA, 25 bp, Artificial Sequence
  Synthetic Oligonucleotide
tgtcggtacgtcctggacagagtgc

SEQ ID NO: 8661 - DNA, 25 bp, Artificial Sequence
  Synthetic Oligonucleotide
ttgtacctacgaagtatacgaatgc

SEQ ID NO: 8662 - DNA, 25 bp, Artificial Sequence
  Synthetic Oligonucleotide
tgtcaccactaaagacgtcagtagc

SEQ ID NO: 8663 - DNA, 25 bp, Artificial Sequence
  Synthetic Oligonucleotide
caagcttacccaccagcggcggtgc

SEQ ID NO: 8664 - DNA, 25 bp, Artificial Sequence
  Synthetic Oligonucleotide
ctgctcttagcatcccggacgaggc

SEQ ID NO: 8665 - DNA, 25 bp, Artificial Sequence
  Synthetic Oligonucleotide
gcttgtgcaacctgtaccagacgtc

SEQ ID NO: 8666 - DNA, 25 bp, Artificial Sequence
  Synthetic Oligonucleotide
tagacgtacaaccagtatcacacgc

SEQ ID NO: 8667 - DNA, 25 bp, Artificial Sequence
  Synthetic Oligonucleotide
ccagagcagtagcagtacgtccggc

SEQ ID NO: 8668 - DNA, 25 bp, Artificial Sequence
  Synthetic Oligonucleotide
ccacggacacggatactagtccggc

SEQ ID NO: 8669 - DNA, 25 bp, Artificial Sequence
  Synthetic Oligonucleotide
cgcacggacttgatcgtaaccgccg

SEQ ID NO: 8670 - DNA, 25 bp, Artificial Sequence
  Synthetic Oligonucleotide
taggtaggcttcagtagtcctagcc

SEQ ID NO: 8671 - DNA, 25 bp, Artificial Sequence
  Synthetic Oligonucleotide
ccgagtgaagctggtgtaggccgcc

SEQ ID NO: 8672 - DNA, 25 bp, Artificial Sequence
  Synthetic Oligonucleotide
accagtcgggcttggcagccgagct

SEQ ID NO: 8673 - DNA, 25 bp, Artificial Sequence
  Synthetic Oligonucleotide
acttgcggcgcttgagccatcccgt

SEQ ID NO: 8674 - DNA, 25 bp, Artificial Sequence
  Synthetic Oligonucleotide
gttggagacgacgaggcctccctat

SEQ ID NO: 8675 - DNA, 25 bp, Artificial Sequence
  Synthetic Oligonucleotide
gtagtgtgggacgacggatcccgcc

SEQ ID NO: 8676 - DNA, 25 bp, Artificial Sequence
  Synthetic Oligonucleotide
tggtaggttagcgatcatcgctgcc

SEQ ID NO: 8677 - DNA, 25 bp, Artificial Sequence
  Synthetic Oligonucleotide
ggaggtgccacgatgttcgatcgcc

SEQ ID NO: 8678 - DNA, 25 bp, Artificial Sequence
  Synthetic Oligonucleotide
ggactctgcgtcctggttcacctcc

SEQ ID NO: 8679 - DNA, 25 bp, Artificial Sequence
  Synthetic Oligonucleotide
aggtccctgctccaacttcgccggc

SEQ ID NO: 8680 - DNA, 25 bp, Artificial Sequence
  Synthetic Oligonucleotide
gcgctgctgcaccaacctcaggagc

SEQ ID NO: 8681 - DNA, 25 bp, Artificial Sequence
  Synthetic Oligonucleotide
gactctcctggcaaagacccagagc

SEQ ID NO: 8682 - DNA, 25 bp, Artificial Sequence
  Synthetic Oligonucleotide
ggcttttgccacaggccgaagagcg

SEQ ID NO: 8683 - DNA, 25 bp, Artificial Sequence
  Synthetic Oligonucleotide
cgtctaagtccaagcccaagtagtc

SEQ ID NO: 8684 - DNA, 25 bp, Artificial Sequence
  Synthetic Oligonucleotide
tacattaattcatgcccaggttacg

SEQ ID NO: 8685 - DNA, 25 bp, Artificial Sequence
  Synthetic Oligonucleotide
agtttaattcggggtccgaggtgag

SEQ ID NO: 8686 - DNA, 25 bp, Artificial Sequence
  Synthetic Oligonucleotide
gtttcatgcaggaaggagttcgacg

SEQ ID NO: 8687 - DNA, 25 bp, Artificial Sequence
  Synthetic Oligonucleotide
ctcccatgccggaaggaggtcgacg

SEQ ID NO: 8688 - DNA, 25 bp, Artificial Sequence
  Synthetic Oligonucleotide
tcgcatcggctgaagcgacagcgcg

SEQ ID NO: 8689 - DNA, 25 bp, Artificial Sequence
  Synthetic Oligonucleotide
atcagcaggcgcagctgcacgaacc

SEQ ID NO: 8690 - DNA, 25 bp, Artificial Sequence
  Synthetic Oligonucleotide
cgggaggtcagggtgctcgacacgc

SEQ ID NO: 8691 - DNA, 25 bp, Artificial Sequence
  Synthetic Oligonucleotide
ccggtagagaaccagcttcagatcc

SEQ ID NO: 8692 - DNA, 25 bp, Artificial Sequence
  Synthetic Oligonucleotide
cgcttaggccggtacgtgtaaggcc

SEQ ID NO: 8693 - DNA, 25 bp, Artificial Sequence
  Synthetic Oligonucleotide
cttcgagccgagtcggtaagcgcgc

SEQ ID NO: 8694 - DNA, 25 bp, Artificial Sequence
  Synthetic Oligonucleotide
gggtgtgtccaagacgaacgctcgc

SEQ ID NO: 8695 - DNA, 25 bp, Artificial Sequence
  Synthetic Oligonucleotide
gggtgtgccgttggaagtacttgtc

SEQ ID NO: 8696 - DNA, 25 bp, Artificial Sequence
  Synthetic Oligonucleotide
cactctgtcccaacgaatagttgtc

SEQ ID NO: 8697 - DNA, 25 bp, Artificial Sequence
  Synthetic Oligonucleotide
agggtcttgagtcagacatctagtc

SEQ ID NO: 8698 - DNA, 25 bp, Artificial Sequence
  Synthetic Oligonucleotide
gaagggtgacaattagacattacgc

SEQ ID NO: 8699 - DNA, 25 bp, Artificial Sequence
  Synthetic Oligonucleotide
gagtcgggtgccatagagcagtccc

SEQ ID NO: 8700 - DNA, 25 bp, Artificial Sequence
  Synthetic Oligonucleotide
cagcagttctacgatggcaagtcct

SEQ ID NO: 8701 - DNA, 25 bp, Artificial Sequence
  Synthetic Oligonucleotide
aggacttgccatcgtagaactgctg

SEQ ID NO: 8702 - DNA, 25 bp, Artificial Sequence
  Synthetic Oligonucleotide
cggtcccgagacgagtagaaccacc

SEQ ID NO: 8703 - DNA, 25 bp, Artificial Sequence
  Synthetic Oligonucleotide
ggtctcggtaacagcgtgtgctccc

SEQ ID NO: 8704 - DNA, 25 bp, Artificial Sequence
  Synthetic Oligonucleotide
gttgtcggagaagctctgggtcacc

SEQ ID NO: 8705 - DNA, 25 bp, Artificial Sequence
  Synthetic Oligonucleotide
ttcgcgaataaggtcaaagtactcc

SEQ ID NO: 8706 - DNA, 25 bp, Artificial Sequence
  Synthetic Oligonucleotide
tctgtggtagtttggtctgaattcc

SEQ ID NO: 8707 - DNA, 25 bp, Artificial Sequence
  Synthetic Oligonucleotide
gtagtgcggtgttgaacggccttcc

SEQ ID NO: 8708 - DNA, 25 bp, Artificial Sequence
  Synthetic Oligonucleotide
aggacttgccatcgtagaactgctg

SEQ ID NO: 8709 - DNA, 25 bp, Artificial Sequence
  Synthetic Oligonucleotide
cagcagttctacgatggcaagtcct

SEQ ID NO: 8710 - DNA, 25 bp, Artificial Sequence
  Synthetic Oligonucleotide
gacccttgacgtagactatgaccgt

SEQ ID NO: 8711 - DNA, 25 bp, Artificial Sequence
  Synthetic Oligonucleotide
cacacattcgcgtcgctacgcaact

SEQ ID NO: 8712 - DNA, 25 bp, Artificial Sequence
  Synthetic Oligonucleotide
aacgcgacattgcggtcgcgcagcg

SEQ ID NO: 8713 - DNA, 25 bp, Artificial Sequence
  Synthetic Oligonucleotide
tctagacgtatggaggtgcgtctgc

SEQ ID NO: 8714 - DNA, 25 bp, Artificial Sequence
  Synthetic Oligonucleotide
tctagacgtatggaggtgcgtctgc

SEQ ID NO: 8715 - DNA, 25 bp, Artificial Sequence
  Synthetic Oligonucleotide
gggtgtgacctgaagcggcgttgtg

SEQ ID NO: 8716 - DNA, 25 bp, Artificial Sequence
  Synthetic Oligonucleotide
gctctagtagcttcaaggcttagtg

SEQ ID NO: 8717 - DNA, 25 bp, Artificial Sequence
  Synthetic Oligonucleotide
agctcgaagttcgagaaccgttatg

SEQ ID NO: 8718 - DNA, 25 bp, Artificial Sequence
  Synthetic Oligonucleotide
aaactcaagtgcagatccatataag

SEQ ID NO: 8719 - DNA, 25 bp, Artificial Sequence
  Synthetic Oligonucleotide
aagaaccatgcaaaccggtacagcg

SEQ ID NO: 8720 - DNA, 25 bp, Artificial Sequence
  Synthetic Oligonucleotide
ggacgacctatttacaacccgaacc

SEQ ID NO: 8721 - DNA, 25 bp, Artificial Sequence
  Synthetic Oligonucleotide
acttctacgtccagacgcgcaacgc

SEQ ID NO: 8722 - DNA, 25 bp, Artificial Sequence
  Synthetic Oligonucleotide
acacacgtagtcgagcagctagcgc

SEQ ID NO: 8723 - DNA, 25 bp, Artificial Sequence
  Synthetic Oligonucleotide
tacagcgcgtgctagagcgcgagcc

SEQ ID NO: 8724 - DNA, 25 bp, Artificial Sequence
  Synthetic Oligonucleotide
actagagcggcatcagtacctagcc

SEQ ID NO: 8725 - DNA, 25 bp, Artificial Sequence
  Synthetic Oligonucleotide
gagtaggaggtgtcatatacagcgc

SEQ ID NO: 8726 - DNA, 25 bp, Artificial Sequence
  Synthetic Oligonucleotide
cggactcggagtagtggatgcatcc

SEQ ID NO: 8727 - DNA, 25 bp, Artificial Sequence
  Synthetic Oligonucleotide
aatcggagtaaggtttgtacgatcc

SEQ ID NO: 8728 - DNA, 25 bp, Artificial Sequence
  Synthetic Oligonucleotide
ttcctcggagtcattcgttctgccc

SEQ ID NO: 8729 - DNA, 25 bp, Artificial Sequence
  Synthetic Oligonucleotide
catcgtggtgtcgttctcactggcc

SEQ ID NO: 8730 - DNA, 25 bp, Artificial Sequence
  Synthetic Oligonucleotide
aggacttgccatcgtagaactgctg

SEQ ID NO: 8731 - DNA, 25 bp, Artificial Sequence
  Synthetic Oligonucleotide
cagcagttctacgatggcaagtcct

SEQ ID NO: 8732 - DNA, 25 bp, Artificial Sequence
  Synthetic Oligonucleotide
tttaggtctgtatcaatagatagtt

SEQ ID NO: 8733 - DNA, 25 bp, Artificial Sequence
  Synthetic Oligonucleotide
ggtggttaggtctgcctcatgaaag

SEQ ID NO: 8734 - DNA, 25 bp, Artificial Sequence
  Synthetic Oligonucleotide
gttggctgtgcaaccgtcatccctg

SEQ ID NO: 8735 - DNA, 25 bp, Artificial Sequence
  Synthetic Oligonucleotide
gaacttgaggactggagtccactag

SEQ ID NO: 8736 - DNA, 25 bp, Artificial Sequence
  Synthetic Oligonucleotide
gatcctgacctcaggagtcaacact

SEQ ID NO: 8737 - DNA, 25 bp, Artificial Sequence
  Synthetic Oligonucleotide
cagtttggcctcaggagcacctacg

SEQ ID NO: 8738 - DNA, 25 bp, Artificial Sequence
  Synthetic Oligonucleotide
tcactttcggaaatttacgtccctg

SEQ ID NO: 8739 - DNA, 25 bp, Artificial Sequence
  Synthetic Oligonucleotide
ctactataacggcattttgaggccg

SEQ ID NO: 8740 - DNA, 25 bp, Artificial Sequence
  Synthetic Oligonucleotide
tatacagcgccgtgtctgaagtcag

SEQ ID NO: 8741 - DNA, 25 bp, Artificial Sequence
  Synthetic Oligonucleotide
gttcacgaccacttagccgttgcag

SEQ ID NO: 8742 - DNA, 25 bp, Artificial Sequence
  Synthetic Oligonucleotide
tagtcacaccaagtaccgttagtcc

SEQ ID NO: 8743 - DNA, 25 bp, Artificial Sequence
  Synthetic Oligonucleotide
cacttatcctaagtagacgttttcg

SEQ ID NO: 8744 - DNA, 25 bp, Artificial Sequence
  Synthetic Oligonucleotide
cccgtccctgaattagttgcgttcg

SEQ ID NO: 8745 - DNA, 25 bp, Artificial Sequence
  Synthetic Oligonucleotide
tctttcctcaaatctacgttgcggc

SEQ ID NO: 8746 - DNA, 25 bp, Artificial Sequence
  Synthetic Oligonucleotide
actcctagacaaccatctagcggtc

SEQ ID NO: 8747 - DNA, 25 bp, Artificial Sequence
  Synthetic Oligonucleotide
aaccttgctgcactcattgtggtag

SEQ ID NO: 8748 - DNA, 25 bp, Artificial Sequence
  Synthetic Oligonucleotide
ctgaggtgctacataagccgtggtc

SEQ ID NO: 8749 - DNA, 25 bp, Artificial Sequence
  Synthetic Oligonucleotide
tcgggtgagcacaaccgccgtagcc

SEQ ID NO: 8750 - DNA, 25 bp, Artificial Sequence
  Synthetic Oligonucleotide
tatgtagtcacatcgcgcgcacgcc

SEQ ID NO: 8751 - DNA, 25 bp, Artificial Sequence
  Synthetic Oligonucleotide
tatgtagtcacatcgcgcgcacgcc

SEQ ID NO: 8752 - DNA, 25 bp, Artificial Sequence
  Synthetic Oligonucleotide
aggacttgccatcgtagaactgctg

SEQ ID NO: 8753 - DNA, 25 bp, Artificial Sequence
  Synthetic Oligonucleotide
cagcagttctacgatggcaagtcct

SEQ ID NO: 8754 - DNA, 25 bp, Artificial Sequence
  Synthetic Oligonucleotide
tgttgagatctctatctcggaaggg

SEQ ID NO: 8755 - DNA, 25 bp, Artificial Sequence
  Synthetic Oligonucleotide
atttgaacctgttggttgcggttcg

SEQ ID NO: 8756 - DNA, 25 bp, Artificial Sequence
  Synthetic Oligonucleotide
atctttaacgggtcattggcctacg

SEQ ID NO: 8757 - DNA, 25 bp, Artificial Sequence
  Synthetic Oligonucleotide
tctttatgctcttctttaggcctcg

SEQ ID NO: 8758 - DNA, 25 bp, Artificial Sequence
  Synthetic Oligonucleotide
acttcagtgtcctctgttggaccag

SEQ ID NO: 8759 - DNA, 25 bp, Artificial Sequence
  Synthetic Oligonucleotide
attcagttcgccttgaagaagtaag

SEQ ID NO: 8760 - DNA, 25 bp, Artificial Sequence
  Synthetic Oligonucleotide
tccgttgttccctaaagacagtaag

SEQ ID NO: 8761 - DNA, 25 bp, Artificial Sequence
  Synthetic Oligonucleotide
gaactcattgtcgacaagaacaaag

SEQ ID NO: 8762 - DNA, 25 bp, Artificial Sequence
  Synthetic Oligonucleotide
gtataactcttcgaagacaacaaag

SEQ ID NO: 8763 - DNA, 25 bp, Artificial Sequence
  Synthetic Oligonucleotide
tactggcctttccaacgacacaaag

SEQ ID NO: 8764 - DNA, 25 bp, Artificial Sequence
  Synthetic Oligonucleotide
tgcgattttagctagtcgacagaag

SEQ ID NO: 8765 - DNA, 25 bp, Artificial Sequence
  Synthetic Oligonucleotide
ccgtacttttcaccatgaccgacag

SEQ ID NO: 8766 - DNA, 25 bp, Artificial Sequence
  Synthetic Oligonucleotide
aggagttcttcccatcggtcacgag

SEQ ID NO: 8767 - DNA, 25 bp, Artificial Sequence
  Synthetic Oligonucleotide
ataaggatcgacgccataggtccgc

SEQ ID NO: 8768 - DNA, 25 bp, Artificial Sequence
  Synthetic Oligonucleotide
atgaagaccaatgacgctacctccc

SEQ ID NO: 8769 - DNA, 25 bp, Artificial Sequence
  Synthetic Oligonucleotide
gaaaccgctagtggactaggtcccg

SEQ ID NO: 8770 - DNA, 25 bp, Artificial Sequence
  Synthetic Oligonucleotide
aacagtacctactggaaccggtccc

SEQ ID NO: 8771 - DNA, 25 bp, Artificial Sequence
  Synthetic Oligonucleotide
aacagtacctactggaaccggtccc

SEQ ID NO: 8772 - DNA, 25 bp, Artificial Sequence
  Synthetic Oligonucleotide
cagtaactactggaaccgttcacct

SEQ ID NO: 8773 - DNA, 25 bp, Artificial Sequence
  Synthetic Oligonucleotide
gcgaaatactcgcgaccactagacc

SEQ ID NO: 8774 - DNA, 25 bp, Artificial Sequence
  Synthetic Oligonucleotide
aggacttgccatcgtagaactgctg

SEQ ID NO: 8775 - DNA, 25 bp, Artificial Sequence
  Synthetic Oligonucleotide
cagcagttctacgatggcaagtcct

SEQ ID NO: 8776 - DNA, 25 bp, Artificial Sequence
  Synthetic Oligonucleotide
ggccggtttagctaagagttttacc

SEQ ID NO: 8777 - DNA, 25 bp, Artificial Sequence
  Synthetic Oligonucleotide
ggtcctttactcgaactgtttcacc

SEQ ID NO: 8778 - DNA, 25 bp, Artificial Sequence
  Synthetic Oligonucleotide
cacttactcacgcaatgttatcaat

SEQ ID NO: 8779 - DNA, 25 bp, Artificial Sequence
  Synthetic Oligonucleotide
gcgaaagctcggagtcgcagtcaat

SEQ ID NO: 8780 - DNA, 25 bp, Artificial Sequence
  Synthetic Oligonucleotide
agacgaaaaggacgtctaagtccat

SEQ ID NO: 8781 - DNA, 25 bp, Artificial Sequence
  Synthetic Oligonucleotide
gaatacaactagtccgtttctgaat

SEQ ID NO: 8782 - DNA, 25 bp, Artificial Sequence
  Synthetic Oligonucleotide
gaattagttgcgttcgaatactggg

SEQ ID NO: 8783 - DNA, 25 bp, Artificial Sequence
  Synthetic Oligonucleotide
ttagctgtcgttgcacgactggacg

SEQ ID NO: 8784 - DNA, 25 bp, Artificial Sequence
  Synthetic Oligonucleotide
tgcgactcggtcagtcacatcgcgc

SEQ ID NO: 8785 - DNA, 25 bp, Artificial Sequence
  Synthetic Oligonucleotide
ggacggtcgtgccgtcaaacgacgc

SEQ ID NO: 8786 - DNA, 25 bp, Artificial Sequence
  Synthetic Oligonucleotide
tttgaggtcgcgcccggtatagagc

SEQ ID NO: 8787 - DNA, 25 bp, Artificial Sequence
  Synthetic Oligonucleotide
cattgcggtcgcgcagcgataacgc

SEQ ID NO: 8788 - DNA, 25 bp, Artificial Sequence
  Synthetic Oligonucleotide
tttcgttacactctgagtataaccg

SEQ ID NO: 8789 - DNA, 25 bp, Artificial Sequence
  Synthetic Oligonucleotide
gctggcgttccaactttgagtttcc

SEQ ID NO: 8790 - DNA, 25 bp, Artificial Sequence
  Synthetic Oligonucleotide
tggtcgtttctagtttgcgacaacc

SEQ ID NO: 8791 - DNA, 25 bp, Artificial Sequence
  Synthetic Oligonucleotide
tggtcgtttctagtttgcgacaacc

SEQ ID NO: 8792 - DNA, 25 bp, Artificial Sequence
  Synthetic Oligonucleotide
ggtcggttcaggtctgcgtcctacc

SEQ ID NO: 8793 - DNA, 25 bp, Artificial Sequence
  Synthetic Oligonucleotide
ggtgggccaggagcccgtcctacgc

SEQ ID NO: 8794 - DNA, 25 bp, Artificial Sequence
  Synthetic Oligonucleotide
ggggagcatctacccgtgtcacacc

SEQ ID NO: 8795 - DNA, 25 bp, Artificial Sequence
  Synthetic Oligonucleotide
aggcagtcacatcgcgcgcacgccg

SEQ ID NO: 8796 - DNA, 25 bp, Artificial Sequence
  Synthetic Oligonucleotide
aggacttgccatcgtagaactgctg

SEQ ID NO: 8797 - DNA, 25 bp, Artificial Sequence
  Synthetic Oligonucleotide
cagcagttctacgatggcaagtcct

SEQ ID NO: 8798 - DNA, 25 bp, Artificial Sequence
  Synthetic Oligonucleotide
tcgagtctctgtcttgtccggtccc

SEQ ID NO: 8799 - DNA, 25 bp, Artificial Sequence
  Synthetic Oligonucleotide
gtgtcgtcttcattagtaccttccc

SEQ ID NO: 8800 - DNA, 25 bp, Artificial Sequence
  Synthetic Oligonucleotide
gggactcgcggaggtcgtccttccc

SEQ ID NO: 8801 - DNA, 25 bp, Artificial Sequence
  Synthetic Oligonucleotide
gtgttcaggcggctgctctcttcgc

SEQ ID NO: 8802 - DNA, 25 bp, Artificial Sequence
  Synthetic Oligonucleotide
tgttcgcgtggcctcggtcgtttcc

SEQ ID NO: 8803 - DNA, 25 bp, Artificial Sequence
  Synthetic Oligonucleotide
tacagggtttgcagtggtctctccc

SEQ ID NO: 8804 - DNA, 25 bp, Artificial Sequence
  Synthetic Oligonucleotide
catttttcgctaatcgtacgcctgc

SEQ ID NO: 8805 - DNA, 25 bp, Artificial Sequence
  Synthetic Oligonucleotide
ctttctatctctttaccacgcctgc

SEQ ID NO: 8806 - DNA, 25 bp, Artificial Sequence
  Synthetic Oligonucleotide
gtctttgtttctgtcagtccgttgc

SEQ ID NO: 8807 - DNA, 25 bp, Artificial Sequence
  Synthetic Oligonucleotide
tgtttggtgtctacaaataatctgc

SEQ ID NO: 8808 - DNA, 25 bp, Artificial Sequence
  Synthetic Oligonucleotide
taggttgatgctcgaaaaattgacg

SEQ ID NO: 8809 - DNA, 25 bp, Artificial Sequence
  Synthetic Oligonucleotide
agaatgttgtctcgaaatgctaggc

SEQ ID NO: 8810 - DNA, 25 bp, Artificial Sequence
  Synthetic Oligonucleotide
acgagtttttccaccatctcacggc

SEQ ID NO: 8811 - DNA, 25 bp, Artificial Sequence
  Synthetic Oligonucleotide
gagttttacccgaccgtgttctggg

SEQ ID NO: 8812 - DNA, 25 bp, Artificial Sequence
  Synthetic Oligonucleotide
gattcttgccggtacgtggtggtgg

SEQ ID NO: 8813 - DNA, 25 bp, Artificial Sequence
  Synthetic Oligonucleotide
gacttcctggggacctctgagacgg

SEQ ID NO: 8814 - DNA, 25 bp, Artificial Sequence
  Synthetic Oligonucleotide
cgttccggggatgacgcccagccgt

SEQ ID NO: 8815 - DNA, 25 bp, Artificial Sequence
  Synthetic Oligonucleotide
ctgcggtgtcgacgtccagcaacct

SEQ ID NO: 8816 - DNA, 25 bp, Artificial Sequence
  Synthetic Oligonucleotide
gcggtcggtgttacggcccagtacc

SEQ ID NO: 8817 - DNA, 25 bp, Artificial Sequence
  Synthetic Oligonucleotide
gggaagttacgtaccgtcctcatcc

SEQ ID NO: 8818 - DNA, 25 bp, Artificial Sequence
  Synthetic Oligonucleotide
aggacttgccatcgtagaactgctg

SEQ ID NO: 8819 - DNA, 25 bp, Artificial Sequence
  Synthetic Oligonucleotide
cagcagttctacgatggcaagtcct

SEQ ID NO: 8820 - DNA, 25 bp, Artificial Sequence
  Synthetic Oligonucleotide
aacaaaactctaggtgtaaacaacc

SEQ ID NO: 8821 - DNA, 25 bp, Artificial Sequence
  Synthetic Oligonucleotide
taaggaaacctacccaatacttgag

SEQ ID NO: 8822 - DNA, 25 bp, Artificial Sequence
  Synthetic Oligonucleotide
acaaccggtccgaccagaacttgag

SEQ ID NO: 8823 - DNA, 25 bp, Artificial Sequence
  Synthetic Oligonucleotide
caacaggtctgcgaccaatcgtgct

SEQ ID NO: 8824 - DNA, 25 bp, Artificial Sequence
  Synthetic Oligonucleotide
ttaacagggtctcttcaagactcct

SEQ ID NO: 8825 - DNA, 25 bp, Artificial Sequence
  Synthetic Oligonucleotide
acggagtgtcgtgtggaagcgtccg

SEQ ID NO: 8826 - DNA, 25 bp, Artificial Sequence
  Synthetic Oligonucleotide
aggacttgccatcgtagaactgctg

SEQ ID NO: 8827 - DNA, 25 bp, Artificial Sequence
  Synthetic Oligonucleotide
cagcagttctacgatggcaagtcct

SEQ ID NO: 8828 - DNA, 25 bp, Artificial Sequence
  Synthetic Oligonucleotide
cggtcccgagaccagtagaaccacc

SEQ ID NO: 8829 - DNA, 25 bp, Artificial Sequence
  Synthetic Oligonucleotide
ggtctcggtaactgcgtgtgctccc

SEQ ID NO: 8830 - DNA, 25 bp, Artificial Sequence
  Synthetic Oligonucleotide
gttgtcggagaacctctgggtcacc

SEQ ID NO: 8831 - DNA, 25 bp, Artificial Sequence
  Synthetic Oligonucleotide
ttcgcgaataagctcaaagtactcc

SEQ ID NO: 8832 - DNA, 25 bp, Artificial Sequence
  Synthetic Oligonucleotide
tctgtggtagttaggtctgaattcc

SEQ ID NO: 8833 - DNA, 25 bp, Artificial Sequence
  Synthetic Oligonucleotide
gtagtgcggtgtagaacggccttcc

SEQ ID NO: 8834 - DNA, 25 bp, Artificial Sequence
  Synthetic Oligonucleotide
cagcagttctacgatggcaagtcct

SEQ ID NO: 8835 - DNA, 25 bp, Artificial Sequence
  Synthetic Oligonucleotide
aggacttgccatcgtagaactgctg

SEQ ID NO: 8836 - DNA, 25 bp, Artificial Sequence
  Synthetic Oligonucleotide
gacccttgacgttgactatgaccgt

SEQ ID NO: 8837 - DNA, 25 bp, Artificial Sequence
  Synthetic Oligonucleotide
cacacattcgcgacgctacgcaact

SEQ ID NO: 8838 - DNA, 25 bp, Artificial Sequence
  Synthetic Oligonucleotide
aacgcgacattggggtcgcgcagcg

SEQ ID NO: 8839 - DNA, 25 bp, Artificial Sequence
  Synthetic Oligonucleotide
tctagacgtatgcaggtgcgtctgc

SEQ ID NO: 8840 - DNA, 25 bp, Artificial Sequence
  Synthetic Oligonucleotide
tctagacgtatgcaggtgcgtctgc

SEQ ID NO: 8841 - DNA, 25 bp, Artificial Sequence
  Synthetic Oligonucleotide
gggtgtgacctgtagcggcgttgtg

SEQ ID NO: 8842 - DNA, 25 bp, Artificial Sequence
  Synthetic Oligonucleotide
gctctagtagctacaaggcttagtg

SEQ ID NO: 8843 - DNA, 25 bp, Artificial Sequence
  Synthetic Oligonucleotide
agctcgaagttccagaaccgttatg

SEQ ID NO: 8844 - DNA, 25 bp, Artificial Sequence
  Synthetic Oligonucleotide
aaactcaagtgctgatccatataag

SEQ ID NO: 8845 - DNA, 25 bp, Artificial Sequence
  Synthetic Oligonucleotide
aagaaccatgcataccggtacagcg

SEQ ID NO: 8846 - DNA, 25 bp, Artificial Sequence
  Synthetic Oligonucleotide
ggacgacctattaacaacccgaacc

SEQ ID NO: 8847 - DNA, 25 bp, Artificial Sequence
  Synthetic Oligonucleotide
acttctacgtcctgacgcgcaacgc

SEQ ID NO: 8848 - DNA, 25 bp, Artificial Sequence
  Synthetic Oligonucleotide
acacacgtagtccagcagctagcgc

SEQ ID NO: 8849 - DNA, 25 bp, Artificial Sequence
  Synthetic Oligonucleotide
tacagcgcgtgcaagagcgcgagcc

SEQ ID NO: 8850 - DNA, 25 bp, Artificial Sequence
  Synthetic Oligonucleotide
actagagcggcaacagtacctagcc

SEQ ID NO: 8851 - DNA, 25 bp, Artificial Sequence
  Synthetic Oligonucleotide
gagtaggaggtgacatatacagcgc

SEQ ID NO: 8852 - DNA, 25 bp, Artificial Sequence
  Synthetic Oligonucleotide
cggactcggagttgtggatgcatcc

SEQ ID NO: 8853 - DNA, 25 bp, Artificial Sequence
  Synthetic Oligonucleotide
aatcggagtaagctttgtacgatcc

SEQ ID NO: 8854 - DNA, 25 bp, Artificial Sequence
  Synthetic Oligonucleotide
ttcctcggagtctttcgttctgccc

SEQ ID NO: 8855 - DNA, 25 bp, Artificial Sequence
  Synthetic Oligonucleotide
catcgtggtgtccttctcactggcc

SEQ ID NO: 8856 - DNA, 25 bp, Artificial Sequence
  Synthetic Oligonucleotide
cagcagttctacgatggcaagtcct

SEQ ID NO: 8857 - DNA, 25 bp, Artificial Sequence
  Synthetic Oligonucleotide
aggacttgccatcgtagaactgctg

SEQ ID NO: 8858 - DNA, 25 bp, Artificial Sequence
  Synthetic Oligonucleotide
tttaggtctgtaacaatagatagtt

SEQ ID NO: 8859 - DNA, 25 bp, Artificial Sequence
  Synthetic Oligonucleotide
ggtggttaggtcagcctcatgaaag

SEQ ID NO: 8860 - DNA, 25 bp, Artificial Sequence
  Synthetic Oligonucleotide
gttggctgtgcatccgtcatccctg

SEQ ID NO: 8861 - DNA, 25 bp, Artificial Sequence
  Synthetic Oligonucleotide
gaacttgaggacaggagtccactag

SEQ ID NO: 8862 - DNA, 25 bp, Artificial Sequence
  Synthetic Oligonucleotide
gatcctgacctctggagtcaacact

SEQ ID NO: 8863 - DNA, 25 bp, Artificial Sequence
  Synthetic Oligonucleotide
cagtttggcctctggagcacctacg

SEQ ID NO: 8864 - DNA, 25 bp, Artificial Sequence
  Synthetic Oligonucleotide
tcactttcggaattttacgtccctg

SEQ ID NO: 8865 - DNA, 25 bp, Artificial Sequence
  Synthetic Oligonucleotide
ctactataacgggattttgaggccg

SEQ ID NO: 8866 - DNA, 25 bp, Artificial Sequence
  Synthetic Oligonucleotide
tatacagcgccgagtctgaagtcag

SEQ ID NO: 8867 - DNA, 25 bp, Artificial Sequence
  Synthetic Oligonucleotide
gttcacgaccacatagccgttgcag

SEQ ID NO: 8868 - DNA, 25 bp, Artificial Sequence
  Synthetic Oligonucleotide
tagtcacaccaactaccgttagtcc

SEQ ID NO: 8869 - DNA, 25 bp, Artificial Sequence
  Synthetic Oligonucleotide
cacttatcctaactagacgttttcg

SEQ ID NO: 8870 - DNA, 25 bp, Artificial Sequence
  Synthetic Oligonucleotide
cccgtccctgaaatagttgcgttcg

SEQ ID NO: 8871 - DNA, 25 bp, Artificial Sequence
  Synthetic Oligonucleotide
tctttcctcaaaactacgttgcggc

SEQ ID NO: 8872 - DNA, 25 bp, Artificial Sequence
  Synthetic Oligonucleotide
actcctagacaagcatctagcggtc

SEQ ID NO: 8873 - DNA, 25 bp, Artificial Sequence
  Synthetic Oligonucleotide
aaccttgctgcagtcattgtggtag

SEQ ID NO: 8874 - DNA, 25 bp, Artificial Sequence
  Synthetic Oligonucleotide
ctgaggtgctacttaagccgtggtc

SEQ ID NO: 8875 - DNA, 25 bp, Artificial Sequence
  Synthetic Oligonucleotide
tcgggtgagcactaccgccgtagcc

SEQ ID NO: 8876 - DNA, 25 bp, Artificial Sequence
  Synthetic Oligonucleotide
tatgtagtcacaacgcgcgcacgcc

SEQ ID NO: 8877 - DNA, 25 bp, Artificial Sequence
  Synthetic Oligonucleotide
tatgtagtcacaacgcgcgcacgcc

SEQ ID NO: 8878 - DNA, 25 bp, Artificial Sequence
  Synthetic Oligonucleotide
cagcagttctacgatggcaagtcct

SEQ ID NO: 8879 - DNA, 25 bp, Artificial Sequence
  Synthetic Oligonucleotide
aggacttgccatcgtagaactgctg

SEQ ID NO: 8880 - DNA, 25 bp, Artificial Sequence
  Synthetic Oligonucleotide
tgttgagatctcaatctcggaaggg

SEQ ID NO: 8881 - DNA, 25 bp, Artificial Sequence
  Synthetic Oligonucleotide
atttgaacctgtaggttgcggttcg

SEQ ID NO: 8882 - DNA, 25 bp, Artificial Sequence
  Synthetic Oligonucleotide
atctttaacgggacattggcctacg

SEQ ID NO: 8883 - DNA, 25 bp, Artificial Sequence
  Synthetic Oligonucleotide
tctttatgctctactttaggcctcg

SEQ ID NO: 8884 - DNA, 25 bp, Artificial Sequence
  Synthetic Oligonucleotide
acttcagtgtccactgttggaccag

SEQ ID NO: 8885 - DNA, 25 bp, Artificial Sequence
  Synthetic Oligonucleotide
attcagttcgccatgaagaagtaag

SEQ ID NO: 8886 - DNA, 25 bp, Artificial Sequence
  Synthetic Oligonucleotide
tccgttgttcccaaaagacagtaag

SEQ ID NO: 8887 - DNA, 25 bp, Artificial Sequence
  Synthetic Oligonucleotide
gaactcattgtccacaagaacaaag

SEQ ID NO: 8888 - DNA, 25 bp, Artificial Sequence
  Synthetic Oligonucleotide
gtataactcttccaagacaacaaag

SEQ ID NO: 8889 - DNA, 25 bp, Artificial Sequence
  Synthetic Oligonucleotide
tactggcctttcgaacgacacaaag

SEQ ID NO: 8890 - DNA, 25 bp, Artificial Sequence
  Synthetic Oligonucleotide
tgcgattttagcaagtcgacagaag

SEQ ID NO: 8891 - DNA, 25 bp, Artificial Sequence
  Synthetic Oligonucleotide
ccgtacttttcagcatgaccgacag

SEQ ID NO: 8892 - DNA, 25 bp, Artificial Sequence
  Synthetic Oligonucleotide
aggagttcttccgatcggtcacgag

SEQ ID NO: 8893 - DNA, 25 bp, Artificial Sequence
  Synthetic Oligonucleotide
ataaggatcgaccccataggtccgc

SEQ ID NO: 8894 - DNA, 25 bp, Artificial Sequence
  Synthetic Oligonucleotide
atgaagaccaatcacgctacctccc

SEQ ID NO: 8895 - DNA, 25 bp, Artificial Sequence
  Synthetic Oligonucleotide
gaaaccgctagtcgactaggtcccg

SEQ ID NO: 8896 - DNA, 25 bp, Artificial Sequence
  Synthetic Oligonucleotide
aacagtacctacaggaaccggtccc

SEQ ID NO: 8897 - DNA, 25 bp, Artificial Sequence
  Synthetic Oligonucleotide
aacagtacctacaggaaccggtccc

SEQ ID NO: 8898 - DNA, 25 bp, Artificial Sequence
  Synthetic Oligonucleotide
cagtaactactgcaaccgttcacct

SEQ ID NO: 8899 - DNA, 25 bp, Artificial Sequence
  Synthetic Oligonucleotide
gcgaaatactcgggaccactagacc

SEQ ID NO: 8900 - DNA, 25 bp, Artificial Sequence
  Synthetic Oligonucleotide
cagcagttctacgatggcaagtcct

SEQ ID NO: 8901 - DNA, 25 bp, Artificial Sequence
  Synthetic Oligonucleotide
aggacttgccatcgtagaactgctg

SEQ ID NO: 8902 - DNA, 25 bp, Artificial Sequence
  Synthetic Oligonucleotide
ggccggtttagcaaagagttttacc

SEQ ID NO: 8903 - DNA, 25 bp, Artificial Sequence
  Synthetic Oligonucleotide
ggtcctttactccaactgtttcacc

SEQ ID NO: 8904 - DNA, 25 bp, Artificial Sequence
  Synthetic Oligonucleotide
cacttactcacggaatgttatcaat

SEQ ID NO: 8905 - DNA, 25 bp, Artificial Sequence
  Synthetic Oligonucleotide
gcgaaagctcggtgtcgcagtcaat

SEQ ID NO: 8906 - DNA, 25 bp, Artificial Sequence
  Synthetic Oligonucleotide
agacgaaaaggaggtctaagtccat

SEQ ID NO: 8907 - DNA, 25 bp, Artificial Sequence
  Synthetic Oligonucleotide
gaatacaactagaccgtttctgaat

SEQ ID NO: 8908 - DNA, 25 bp, Artificial Sequence
  Synthetic Oligonucleotide
gaattagttgcgatcgaatactggg

SEQ ID NO: 8909 - DNA, 25 bp, Artificial Sequence
  Synthetic Oligonucleotide
ttagctgtcgttccacgactggacg

SEQ ID NO: 8910 - DNA, 25 bp, Artificial Sequence
  Synthetic Oligonucleotide
tgcgactcggtctgtcacatcgcgc

SEQ ID NO: 8911 - DNA, 25 bp, Artificial Sequence
  Synthetic Oligonucleotide
ggacggtcgtgcggtcaaacgacgc

SEQ ID NO: 8912 - DNA, 25 bp, Artificial Sequence
  Synthetic Oligonucleotide
tttgaggtcgcggccggtatagagc

SEQ ID NO: 8913 - DNA, 25 bp, Artificial Sequence
  Synthetic Oligonucleotide
cattgcggtcgcccagcgataacgc

SEQ ID NO: 8914 - DNA, 25 bp, Artificial Sequence
  Synthetic Oligonucleotide
tttcgttacactgtgagtataaccg

SEQ ID NO: 8915 - DNA, 25 bp, Artificial Sequence
  Synthetic Oligonucleotide
gctggcgttccatctttgagtttcc

SEQ ID NO: 8916 - DNA, 25 bp, Artificial Sequence
  Synthetic Oligonucleotide
tggtcgtttctactttgcgacaacc

SEQ ID NO: 8917 - DNA, 25 bp, Artificial Sequence
  Synthetic Oligonucleotide
tggtcgtttctactttgcgacaacc

SEQ ID NO: 8918 - DNA, 25 bp, Artificial Sequence
  Synthetic Oligonucleotide
ggtcggttcaggactgcgtcctacc

SEQ ID NO: 8919 - DNA, 25 bp, Artificial Sequence
  Synthetic Oligonucleotide
ggtgggccaggaccccgtcctacgc

SEQ ID NO: 8920 - DNA, 25 bp, Artificial Sequence
  Synthetic Oligonucleotide
ggggagcatctagccgtgtcacacc

SEQ ID NO: 8921 - DNA, 25 bp, Artificial Sequence
  Synthetic Oligonucleotide
aggcagtcacatggcgcgcacgccg

SEQ ID NO: 8922 - DNA, 25 bp, Artificial Sequence
  Synthetic Oligonucleotide
cagcagttctacgatggcaagtcct

SEQ ID NO: 8923 - DNA, 25 bp, Artificial Sequence
  Synthetic Oligonucleotide
aggacttgccatcgtagaactgctg

SEQ ID NO: 8924 - DNA, 25 bp, Artificial Sequence
  Synthetic Oligonucleotide
tcgagtctctgtgttgtccggtccc

SEQ ID NO: 8925 - DNA, 25 bp, Artificial Sequence
  Synthetic Oligonucleotide
gtgtcgtcttcaatagtaccttccc

SEQ ID NO: 8926 - DNA, 25 bp, Artificial Sequence
  Synthetic Oligonucleotide
gggactcgcggacgtcgtccttccc

SEQ ID NO: 8927 - DNA, 25 bp, Artificial Sequence
  Synthetic Oligonucleotide
gtgttcaggcgggtgctctcttcgc

SEQ ID NO: 8928 - DNA, 25 bp, Artificial Sequence
  Synthetic Oligonucleotide
tgttcgcgtggcgtcggtcgtttcc

SEQ ID NO: 8929 - DNA, 25 bp, Artificial Sequence
  Synthetic Oligonucleotide
tacagggtttgctgtggtctctccc

SEQ ID NO: 8930 - DNA, 25 bp, Artificial Sequence
  Synthetic Oligonucleotide
catttttcgctattcgtacgcctgc

SEQ ID NO: 8931 - DNA, 25 bp, Artificial Sequence
  Synthetic Oligonucleotide
ctttctatctctataccacgcctgc

SEQ ID NO: 8932 - DNA, 25 bp, Artificial Sequence
  Synthetic Oligonucleotide
gtctttgtttctctcagtccgttgc

SEQ ID NO: 8933 - DNA, 25 bp, Artificial Sequence
  Synthetic Oligonucleotide
tgtttggtgtcttcaaataatctgc

SEQ ID NO: 8934 - DNA, 25 bp, Artificial Sequence
  Synthetic Oligonucleotide
taggttgatgctggaaaaattgacg

SEQ ID NO: 8935 - DNA, 25 bp, Artificial Sequence
  Synthetic Oligonucleotide
agaatgttgtctggaaatgctaggc

SEQ ID NO: 8936 - DNA, 25 bp, Artificial Sequence
  Synthetic Oligonucleotide
acgagtttttcctccatctcacggc

SEQ ID NO: 8937 - DNA, 25 bp, Artificial Sequence
  Synthetic Oligonucleotide
gagttttacccgtccgtgttctggg

SEQ ID NO: 8938 - DNA, 25 bp, Artificial Sequence
  Synthetic Oligonucleotide
gattcttgccggaacgtggtggtgg

SEQ ID NO: 8939 - DNA, 25 bp, Artificial Sequence
  Synthetic Oligonucleotide
gacttcctggggtcctctgagacgg

SEQ ID NO: 8940 - DNA, 25 bp, Artificial Sequence
  Synthetic Oligonucleotide
cgttccggggatcacgcccagccgt

SEQ ID NO: 8941 - DNA, 25 bp, Artificial Sequence
  Synthetic Oligonucleotide
ctgcggtgtcgaggtccagcaacct

SEQ ID NO: 8942 - DNA, 25 bp, Artificial Sequence
  Synthetic Oligonucleotide
gcggtcggtgtttcggcccagtacc

SEQ ID NO: 8943 - DNA, 25 bp, Artificial Sequence
  Synthetic Oligonucleotide
gggaagttacgttccgtcctcatcc

SEQ ID NO: 8944 - DNA, 25 bp, Artificial Sequence
  Synthetic Oligonucleotide
cagcagttctacgatggcaagtcct

SEQ ID NO: 8945 - DNA, 25 bp, Artificial Sequence
  Synthetic Oligonucleotide
aggacttgccatcgtagaactgctg

SEQ ID NO: 8946 - DNA, 25 bp, Artificial Sequence
  Synthetic Oligonucleotide
aacaaaactctacgtgtaaacaacc

SEQ ID NO: 8947 - DNA, 25 bp, Artificial Sequence
  Synthetic Oligonucleotide
taaggaaacctagccaatacttgag

SEQ ID NO: 8948 - DNA, 25 bp, Artificial Sequence
  Synthetic Oligonucleotide
acaaccggtccgtccagaacttgag

SEQ ID NO: 8949 - DNA, 25 bp, Artificial Sequence
  Synthetic Oligonucleotide
caacaggtctgccaccaatcgtgct

SEQ ID NO: 8950 - DNA, 25 bp, Artificial Sequence
  Synthetic Oligonucleotide
ttaacagggtctgttcaagactcct

SEQ ID NO: 8951 - DNA, 25 bp, Artificial Sequence
  Synthetic Oligonucleotide
acggagtgtcgtctggaagcgtccg

SEQ ID NO: 8952 - DNA, 25 bp, Artificial Sequence
  Synthetic Oligonucleotide
cagcagttctacgatggcaagtcct

SEQ ID NO: 8953 - DNA, 25 bp, Artificial Sequence
  Synthetic Oligonucleotide
tctgtgacatgaaggaagatccacc

SEQ ID NO: 8954 - DNA, 25 bp, Artificial Sequence
  Synthetic Oligonucleotide
tgtgtcttatgaacgcaaggcctcc

SEQ ID NO: 8955 - DNA, 25 bp, Artificial Sequence
  Synthetic Oligonucleotide
gtgtaccatagaccaaagacccgcc

SEQ ID NO: 8956 - DNA, 25 bp, Artificial Sequence
  Synthetic Oligonucleotide
ttgaggaagtcagaagactaccgcc

SEQ ID NO: 8957 - DNA, 25 bp, Artificial Sequence
  Synthetic Oligonucleotide
gtggagaggtcaggaagtaacttcc

SEQ ID NO: 8958 - DNA, 25 bp, Artificial Sequence
  Synthetic Oligonucleotide
gaagtagtcagccgttacactgtcc

SEQ ID NO: 8959 - DNA, 25 bp, Artificial Sequence
  Synthetic Oligonucleotide
attcattgacacgtgtagaactgcc

SEQ ID NO: 8960 - DNA, 25 bp, Artificial Sequence
  Synthetic Oligonucleotide
ctacgtaacgactgttagaactccc

SEQ ID NO: 8961 - DNA, 25 bp, Artificial Sequence
  Synthetic Oligonucleotide
tcgtaaacgtacaccaacgtcaacg

SEQ ID NO: 8962 - DNA, 25 bp, Artificial Sequence
  Synthetic Oligonucleotide
atatcgaaagacgagggtcggaacg

SEQ ID NO: 8963 - DNA, 25 bp, Artificial Sequence
  Synthetic Oligonucleotide
gaactcgtgaaagagggtcttgact

SEQ ID NO: 8964 - DNA, 25 bp, Artificial Sequence
  Synthetic Oligonucleotide
acgcagtagaaatcgtcggacttgc

SEQ ID NO: 8965 - DNA, 25 bp, Artificial Sequence
  Synthetic Oligonucleotide
ctgatatagacttacgagactgggt

SEQ ID NO: 8966 - DNA, 25 bp, Artificial Sequence
  Synthetic Oligonucleotide
tttactatgtactacgtcggggacg

SEQ ID NO: 8967 - DNA, 25 bp, Artificial Sequence
  Synthetic Oligonucleotide
tactacaatttcgaccgtcgggacg

SEQ ID NO: 8968 - DNA, 25 bp, Artificial Sequence
  Synthetic Oligonucleotide
taccaattagagtacgcgcagttcg

SEQ ID NO: 8969 - DNA, 25 bp, Artificial Sequence
  Synthetic Oligonucleotide
taacccattaaacgcgcggacgacg

SEQ ID NO: 8970 - DNA, 25 bp, Artificial Sequence
  Synthetic Oligonucleotide
tcacccattaaatgcgcggacgacg

SEQ ID NO: 8971 - DNA, 25 bp, Artificial Sequence
  Synthetic Oligonucleotide
cgcaccagtatataagtcgcactgc

SEQ ID NO: 8972 - DNA, 25 bp, Artificial Sequence
  Synthetic Oligonucleotide
tcggaactgtaaaagctagcacagc

SEQ ID NO: 8973 - DNA, 25 bp, Artificial Sequence
  Synthetic Oligonucleotide
ctagaactagaagtaccacgacccc

SEQ ID NO: 8974 - DNA, 25 bp, Artificial Sequence
  Synthetic Oligonucleotide
agaactacagtagtataaaccgtcc

SEQ ID NO: 8975 - DNA, 25 bp, Artificial Sequence
  Synthetic Oligonucleotide
aaaagaacggtggaagtaaccgacc

SEQ ID NO: 8976 - DNA, 25 bp, Artificial Sequence
  Synthetic Oligonucleotide
cagacagttaggaacgatacagacc

SEQ ID NO: 8977 - DNA, 25 bp, Artificial Sequence
  Synthetic Oligonucleotide
ctagaagtactccatcagacagtcc

SEQ ID NO: 8978 - DNA, 25 bp, Artificial Sequence
  Synthetic Oligonucleotide
tccttccgaccttctcacggagtcc

SEQ ID NO: 8979 - DNA, 25 bp, Artificial Sequence
  Synthetic Oligonucleotide
tcttcttggtcctctcgcggtgcct

SEQ ID NO: 8980 - DNA, 25 bp, Artificial Sequence
  Synthetic Oligonucleotide
tttcctgtgacgcaaccgaaggcat

SEQ ID NO: 8981 - DNA, 25 bp, Artificial Sequence
  Synthetic Oligonucleotide
ttctcgtcagcccacgagaatgggt

SEQ ID NO: 8982 - DNA, 25 bp, Artificial Sequence
  Synthetic Oligonucleotide
gttttcagagtatccgaaacttggt

SEQ ID NO: 8983 - DNA, 25 bp, Artificial Sequence
  Synthetic Oligonucleotide
tcggagtatcagataacgttagacg

SEQ ID NO: 8984 - DNA, 25 bp, Artificial Sequence
  Synthetic Oligonucleotide
cgtagggtatactgtctagttcaag

SEQ ID NO: 8985 - DNA, 25 bp, Artificial Sequence
  Synthetic Oligonucleotide
tatgcgtactactgtcgtcgttttg

SEQ ID NO: 8986 - DNA, 25 bp, Artificial Sequence
  Synthetic Oligonucleotide
gtagtagtgacacccgcggttttcg

SEQ ID NO: 8987 - DNA, 25 bp, Artificial Sequence
  Synthetic Oligonucleotide
cagtggtggcgctgccactcctacg

SEQ ID NO: 8988 - DNA, 25 bp, Artificial Sequence
  Synthetic Oligonucleotide
cctgtggacgccgaaccgactcaag

SEQ ID NO: 8989 - DNA, 25 bp, Artificial Sequence
  Synthetic Oligonucleotide
cgcagtagcagtggcaatgcttcag

SEQ ID NO: 8990 - DNA, 25 bp, Artificial Sequence
  Synthetic Oligonucleotide
gcaaccacgcgtccattgctatcgg

SEQ ID NO: 8991 - DNA, 25 bp, Artificial Sequence
  Synthetic Oligonucleotide
tacatcctagactgaatctttatcc

SEQ ID NO: 8992 - DNA, 25 bp, Artificial Sequence
  Synthetic Oligonucleotide
tacccattcaaattattactcgact

SEQ ID NO: 8993 - DNA, 25 bp, Artificial Sequence
  Synthetic Oligonucleotide
ctaccatctcaagtgagtagtccgc

SEQ ID NO: 8994 - DNA, 25 bp, Artificial Sequence
  Synthetic Oligonucleotide
ccaccacttcgacatcggtgcgagc

SEQ ID NO: 8995 - DNA, 25 bp, Artificial Sequence
  Synthetic Oligonucleotide
ccattagtcggacactaaggcggcg

SEQ ID NO: 8996 - DNA, 25 bp, Artificial Sequence
  Synthetic Oligonucleotide
aaatcatcggtacaacaggtctgcg

SEQ ID NO: 8997 - DNA, 25 bp, Artificial Sequence
  Synthetic Oligonucleotide
aaacattctggtctacatattccgg

SEQ ID NO: 8998 - DNA, 25 bp, Artificial Sequence
  Synthetic Oligonucleotide
aatagggttgatcgtaattgtctcc

SEQ ID NO: 8999 - DNA, 25 bp, Artificial Sequence
  Synthetic Oligonucleotide
ctgggtatgagtgtgtgtttcgacc

SEQ ID NO: 9000 - DNA, 25 bp, Artificial Sequence
  Synthetic Oligonucleotide
ggctacgagaggctgtagttcgcgc

SEQ ID NO: 9001 - DNA, 25 bp, Artificial Sequence
  Synthetic Oligonucleotide
gtgttccacgagcgggtgtagtcgc

SEQ ID NO: 9002 - DNA, 25 bp, Artificial Sequence
  Synthetic Oligonucleotide
ttgccgctctagtagtagcttgcgc

SEQ ID NO: 9003 - DNA, 25 bp, Artificial Sequence
  Synthetic Oligonucleotide
tcgaaggctctagtctgctctagcc

SEQ ID NO: 9004 - DNA, 25 bp, Artificial Sequence
  Synthetic Oligonucleotide
tgctgaggtccagtactggctaccc

SEQ ID NO: 9005 - DNA, 25 bp, Artificial Sequence
  Synthetic Oligonucleotide
acttctgaggccacctgagttgctg

SEQ ID NO: 9006 - DNA, 25 bp, Artificial Sequence
  Synthetic Oligonucleotide
acttctgcggccacctgaggtgctg

SEQ ID NO: 9007 - DNA, 25 bp, Artificial Sequence
  Synthetic Oligonucleotide
agagctgctgccacataggcagctg

SEQ ID NO: 9008 - DNA, 25 bp, Artificial Sequence
  Synthetic Oligonucleotide
agagcagccccttgaagagcggcat

SEQ ID NO: 9009 - DNA, 25 bp, Artificial Sequence
  Synthetic Oligonucleotide
gccagaacccgtggagcaaccgcat

SEQ ID NO: 9010 - DNA, 25 bp, Artificial Sequence
  Synthetic Oligonucleotide
acagtttcctgtgacgcaaccgaag

SEQ ID NO: 9011 - DNA, 25 bp, Artificial Sequence
  Synthetic Oligonucleotide
acagcctctacaagagcatccagcg

SEQ ID NO: 9012 - DNA, 25 bp, Artificial Sequence
  Synthetic Oligonucleotide
gagcagagctccaaggaatcgaagg

SEQ ID NO: 9013 - DNA, 25 bp, Artificial Sequence
  Synthetic Oligonucleotide
tcccaggcccgaaggtacaaccaag

SEQ ID NO: 9014 - DNA, 25 bp, Artificial Sequence
  Synthetic Oligonucleotide
cccagtcttccgttgttccctaaag

SEQ ID NO: 9015 - DNA, 25 bp, Artificial Sequence
  Synthetic Oligonucleotide
cagatcccgttgtatcgtgtcgaag

SEQ ID NO: 9016 - DNA, 25 bp, Artificial Sequence
  Synthetic Oligonucleotide
ggctactcgttcttaactgttatag

SEQ ID NO: 9017 - DNA, 25 bp, Artificial Sequence
  Synthetic Oligonucleotide
acggcacgcgccatagaggctgtag

SEQ ID NO: 9018 - DNA, 25 bp, Artificial Sequence
  Synthetic Oligonucleotide
cagggacccgctcatgaggctacag

SEQ ID NO: 9019 - DNA, 25 bp, Artificial Sequence
  Synthetic Oligonucleotide
gagcactcgtcgagacctcactacg

SEQ ID NO: 9020 - DNA, 25 bp, Artificial Sequence
  Synthetic Oligonucleotide
cacacctgcggtcagacgtacctcg

SEQ ID NO: 9021 - DNA, 25 bp, Artificial Sequence
  Synthetic Oligonucleotide
atgccatgaggcggcgtgcgtccag

SEQ ID NO: 9022 - DNA, 25 bp, Artificial Sequence
  Synthetic Oligonucleotide
tccgaagtaggtaccggcggtacag

SEQ ID NO: 9023 - DNA, 25 bp, Artificial Sequence
  Synthetic Oligonucleotide
tgctgaagaggtccctgctcgaact

SEQ ID NO: 9024 - DNA, 25 bp, Artificial Sequence
  Synthetic Oligonucleotide
tctttagtggcgcaagatcgtacct

SEQ ID NO: 9025 - DNA, 25 bp, Artificial Sequence
  Synthetic Oligonucleotide
gcagctagtacgcgtaaagctgttt

SEQ ID NO: 9026 - DNA, 25 bp, Artificial Sequence
  Synthetic Oligonucleotide
cggtgtgcgtcgagtaacatcttcc

SEQ ID NO: 9027 - DNA, 25 bp, Artificial Sequence
  Synthetic Oligonucleotide
aagaaggtggtgactaattctgacc

SEQ ID NO: 9028 - DNA, 25 bp, Artificial Sequence
  Synthetic Oligonucleotide
aaaatgtttggatgtctttcgtacc

SEQ ID NO: 9029 - DNA, 25 bp, Artificial Sequence
  Synthetic Oligonucleotide
actagaactggaagtaccttctacc

SEQ ID NO: 9030 - DNA, 25 bp, Artificial Sequence
  Synthetic Oligonucleotide
caaccataggaggtaatatctacct

SEQ ID NO: 9031 - DNA, 25 bp, Artificial Sequence
  Synthetic Oligonucleotide
ctagtccactagcggtttccgtacc

SEQ ID NO: 9032 - DNA, 25 bp, Artificial Sequence
  Synthetic Oligonucleotide
accgtccctgaggggtcgtcactcc

SEQ ID NO: 9033 - DNA, 25 bp, Artificial Sequence
  Synthetic Oligonucleotide
gtacttcagagggtccgtcagtcgc

SEQ ID NO: 9034 - DNA, 25 bp, Artificial Sequence
  Synthetic Oligonucleotide
ttcgacgagtcggcgctcgtgtacc

SEQ ID NO: 9035 - DNA, 25 bp, Artificial Sequence
  Synthetic Oligonucleotide
tgcttagtacgtaccgcgcacggcc

SEQ ID NO: 9036 - DNA, 25 bp, Artificial Sequence
  Synthetic Oligonucleotide
tatgggacgactaccgggcgctcgc

SEQ ID NO: 9037 - DNA, 25 bp, Artificial Sequence
  Synthetic Oligonucleotide
tcctggggacctctgagacggtcgc

SEQ ID NO: 9038 - DNA, 25 bp, Artificial Sequence
  Synthetic Oligonucleotide
cctggggacctctgagacggtcgcc

SEQ ID NO: 9039 - DNA, 25 bp, Artificial Sequence
  Synthetic Oligonucleotide
gtgtcgcgcgccttcaagaggcgcc

SEQ ID NO: 9040 - DNA, 25 bp, Artificial Sequence
  Synthetic Oligonucleotide
tcgtcgtgtcccacgaggagtcccc

SEQ ID NO: 9041 - DNA, 25 bp, Artificial Sequence
  Synthetic Oligonucleotide
cttacgtctccgcaacaggtccgcc

SEQ ID NO: 9042 - DNA, 25 bp, Artificial Sequence
  Synthetic Oligonucleotide
acagtacctactggaaccggtcccc

SEQ ID NO: 9043 - DNA, 25 bp, Artificial Sequence
  Synthetic Oligonucleotide
tgtgcctcatgaacgcgagtcctcc

SEQ ID NO: 9044 - DNA, 25 bp, Artificial Sequence
  Synthetic Oligonucleotide
tgtgccttatgaacgcgagtccacc

SEQ ID NO: 9045 - DNA, 25 bp, Artificial Sequence
  Synthetic Oligonucleotide
tggctttatgttcgtcgtcgacacc

SEQ ID NO: 9046 - DNA, 25 bp, Artificial Sequence
  Synthetic Oligonucleotide
aggactcctctgtggtgcgacaccg

SEQ ID NO: 9047 - DNA, 25 bp, Artificial Sequence
  Synthetic Oligonucleotide
gaggctcatctgtcggtgacacgcc

SEQ ID NO: 9048 - DNA, 25 bp, Artificial Sequence
  Synthetic Oligonucleotide
ggctctagtctgctctagcccgcgc

SEQ ID NO: 9049 - DNA, 25 bp, Artificial Sequence
  Synthetic Oligonucleotide
agggctcatcgaccctaatgtccgc

SEQ ID NO: 9050 - DNA, 25 bp, Artificial Sequence
  Synthetic Oligonucleotide
agggtttcacgaccctaatgtccgc

SEQ ID NO: 9051 - DNA, 25 bp, Artificial Sequence
  Synthetic Oligonucleotide
gcgcttcggccggaacgtgtaccgc

SEQ ID NO: 9052 - DNA, 25 bp, Artificial Sequence
  Synthetic Oligonucleotide
ggtctagtggtcgcgagtatttcgc

SEQ ID NO: 9053 - DNA, 25 bp, Artificial Sequence
  Synthetic Oligonucleotide
tcgagctgtaggagcgagacctccc

SEQ ID NO: 9054 - DNA, 25 bp, Artificial Sequence
  Synthetic Oligonucleotide
tcgagctgtaggagcgagacctccc

SEQ ID NO: 9055 - DNA, 25 bp, Artificial Sequence
  Synthetic Oligonucleotide
cgactctgttgtagacaactccacc

SEQ ID NO: 9056 - DNA, 25 bp, Artificial Sequence
  Synthetic Oligonucleotide
ttctatctctttaccacgcctgcgc

SEQ ID NO: 9057 - DNA, 25 bp, Artificial Sequence
  Synthetic Oligonucleotide
tttcgatgatttgaccatgacccgc

SEQ ID NO: 9058 - DNA, 25 bp, Artificial Sequence
  Synthetic Oligonucleotide
ttcgatgatttgaccatgacccgcg

SEQ ID NO: 9059 - DNA, 25 bp, Artificial Sequence
  Synthetic Oligonucleotide
tcgatgatttgaccatgacccgcgc

SEQ ID NO: 9060 - DNA, 25 bp, Artificial Sequence
  Synthetic Oligonucleotide
gtgggtttcgcagagagacccgagg

SEQ ID NO: 9061 - DNA, 25 bp, Artificial Sequence
  Synthetic Oligonucleotide
cgggttctacgggaagtcacccggg

SEQ ID NO: 9062 - DNA, 25 bp, Artificial Sequence
  Synthetic Oligonucleotide
aggttgctggacgtcgacaccgcag

SEQ ID NO: 9063 - DNA, 25 bp, Artificial Sequence
  Synthetic Oligonucleotide
caacttcgatggtacaccaacgacc

SEQ ID NO: 9064 - DNA, 25 bp, Artificial Sequence
  Synthetic Oligonucleotide
acatttgtgaggtaccgccagacct

SEQ ID NO: 9065 - DNA, 25 bp, Artificial Sequence
  Synthetic Oligonucleotide
ctatctgtagaggacccagtcaacc

SEQ ID NO: 9066 - DNA, 25 bp, Artificial Sequence
  Synthetic Oligonucleotide
gagtatctagagacccactacaacc

SEQ ID NO: 9067 - DNA, 25 bp, Artificial Sequence
  Synthetic Oligonucleotide
gggttatattcgctctactacatcc

SEQ ID NO: 9068 - DNA, 25 bp, Artificial Sequence
  Synthetic Oligonucleotide
aagttaacttcttctaactcgtcgc

SEQ ID NO: 9069 - DNA, 25 bp, Artificial Sequence
  Synthetic Oligonucleotide
ctaaagaaggttaatacaactgtcc

SEQ ID NO: 9070 - DNA, 25 bp, Artificial Sequence
  Synthetic Oligonucleotide
agcaaaagtcgtagaacaagttcat

SEQ ID NO: 9071 - DNA, 25 bp, Artificial Sequence
  Synthetic Oligonucleotide
gcgaagaactactgggaaagttgct

SEQ ID NO: 9072 - DNA, 25 bp, Artificial Sequence
  Synthetic Oligonucleotide
cgaaggactcaacaaactgtagagt

SEQ ID NO: 9073 - DNA, 25 bp, Artificial Sequence
  Synthetic Oligonucleotide
acaatgctctaccaacaacttcgat

SEQ ID NO: 9074 - DNA, 25 bp, Artificial Sequence
  Synthetic Oligonucleotide
tccaatgcctatatcaagtactgtt

SEQ ID NO: 9075 - DNA, 16 bp, Artificial Sequence
  Synthetic Oligonucleotide
cttgccatcgtagaac

SEQ ID NO: 9076 - DNA, 25 bp, Artificial Sequence
  Synthetic Oligonucleotide
tctgtgacatgatggaagatccacc

SEQ ID NO: 9077 - DNA, 25 bp, Artificial Sequence
  Synthetic Oligonucleotide
tgtgtcttatgatcgcaaggcctcc

SEQ ID NO: 9078 - DNA, 25 bp, Artificial Sequence
  Synthetic Oligonucleotide
gtgtaccatagagcaaagacccgcc

SEQ ID NO: 9079 - DNA, 25 bp, Artificial Sequence
  Synthetic Oligonucleotide
ttgaggaagtcacaagactaccgcc

SEQ ID NO: 9080 - DNA, 25 bp, Artificial Sequence
  Synthetic Oligonucleotide
gtggagaggtcacgaagtaacttcc

SEQ ID NO: 9081 - DNA, 25 bp, Artificial Sequence
  Synthetic Oligonucleotide
gaagtagtcagcggttacactgtcc

SEQ ID NO: 9082 - DNA, 25 bp, Artificial Sequence
  Synthetic Oligonucleotide
attcattgacacctgtagaactgcc

SEQ ID NO: 9083 - DNA, 25 bp, Artificial Sequence
  Synthetic Oligonucleotide
ctacgtaacgacagttagaactccc

SEQ ID NO: 9084 - DNA, 25 bp, Artificial Sequence
  Synthetic Oligonucleotide
tcgtaaacgtactccaacgtcaacg

SEQ ID NO: 9085 - DNA, 25 bp, Artificial Sequence
  Synthetic Oligonucleotide
atatcgaaagaccagggtcggaacg

SEQ ID NO: 9086 - DNA, 25 bp, Artificial Sequence
  Synthetic Oligonucleotide
gaactcgtgaaacagggtcttgact

SEQ ID NO: 9087 - DNA, 25 bp, Artificial Sequence
  Synthetic Oligonucleotide
acgcagtagaaaacgtcggacttgc

SEQ ID NO: 9088 - DNA, 25 bp, Artificial Sequence
  Synthetic Oligonucleotide
ctgatatagactaacgagactgggt

SEQ ID NO: 9089 - DNA, 25 bp, Artificial Sequence
  Synthetic Oligonucleotide
tttactatgtacaacgtcggggacg

SEQ ID NO: 9090 - DNA, 25 bp, Artificial Sequence
  Synthetic Oligonucleotide
tactacaatttccaccgtcgggacg

SEQ ID NO: 9091 - DNA, 25 bp, Artificial Sequence
  Synthetic Oligonucleotide
taccaattagagaacgcgcagttcg

SEQ ID NO: 9092 - DNA, 25 bp, Artificial Sequence
  Synthetic Oligonucleotide
taacccattaaaggcgcggacgacg

SEQ ID NO: 9093 - DNA, 25 bp, Artificial Sequence
  Synthetic Oligonucleotide
tcacccattaaaagcgcggacgacg

SEQ ID NO: 9094 - DNA, 25 bp, Artificial Sequence
  Synthetic Oligonucleotide
cgcaccagtataaaagtcgcactgc

SEQ ID NO: 9095 - DNA, 25 bp, Artificial Sequence
  Synthetic Oligonucleotide
tcggaactgtaatagctagcacagc

SEQ ID NO: 9096 - DNA, 25 bp, Artificial Sequence
  Synthetic Oligonucleotide
ctagaactagaactaccacgacccc

SEQ ID NO: 9097 - DNA, 25 bp, Artificial Sequence
  Synthetic Oligonucleotide
agaactacagtactataaaccgtcc

SEQ ID NO: 9098 - DNA, 25 bp, Artificial Sequence
  Synthetic Oligonucleotide
aaaagaacggtgcaagtaaccgacc

SEQ ID NO: 9099 - DNA, 25 bp, Artificial Sequence
  Synthetic Oligonucleotide
cagacagttaggtacgatacagacc

SEQ ID NO: 9100 - DNA, 25 bp, Artificial Sequence
  Synthetic Oligonucleotide
ctagaagtactcgatcagacagtcc

SEQ ID NO: 9101 - DNA, 25 bp, Artificial Sequence
  Synthetic Oligonucleotide
tccttccgacctactcacggagtcc

SEQ ID NO: 9102 - DNA, 25 bp, Artificial Sequence
  Synthetic Oligonucleotide
tcttcttggtccactcgcggtgcct

SEQ ID NO: 9103 - DNA, 25 bp, Artificial Sequence
  Synthetic Oligonucleotide
tttcctgtgacggaaccgaaggcat

SEQ ID NO: 9104 - DNA, 25 bp, Artificial Sequence
  Synthetic Oligonucleotide
ttctcgtcagccgacgagaatgggt

SEQ ID NO: 9105 - DNA, 25 bp, Artificial Sequence
  Synthetic Oligonucleotide
gttttcagagtaaccgaaacttggt

SEQ ID NO: 9106 - DNA, 25 bp, Artificial Sequence
  Synthetic Oligonucleotide
tcggagtatcagttaacgttagacg

SEQ ID NO: 9107 - DNA, 25 bp, Artificial Sequence
  Synthetic Oligonucleotide
cgtagggtatacagtctagttcaag

SEQ ID NO: 9108 - DNA, 25 bp, Artificial Sequence
  Synthetic Oligonucleotide
tatgcgtactacagtcgtcgttttg

SEQ ID NO: 9109 - DNA, 25 bp, Artificial Sequence
  Synthetic Oligonucleotide
gtagtagtgacagccgcggttttcg

SEQ ID NO: 9110 - DNA, 25 bp, Artificial Sequence
  Synthetic Oligonucleotide
cagtggtggcgcagccactcctacg

SEQ ID NO: 9111 - DNA, 25 bp, Artificial Sequence
  Synthetic Oligonucleotide
cctgtggacgcccaaccgactcaag

SEQ ID NO: 9112 - DNA, 25 bp, Artificial Sequence
  Synthetic Oligonucleotide
cgcagtagcagtcgcaatgcttcag

SEQ ID NO: 9113 - DNA, 25 bp, Artificial Sequence
  Synthetic Oligonucleotide
gcaaccacgcgtgcattgctatcgg

SEQ ID NO: 9114 - DNA, 25 bp, Artificial Sequence
  Synthetic Oligonucleotide
tacatcctagacagaatctttatcc

SEQ ID NO: 9115 - DNA, 25 bp, Artificial Sequence
  Synthetic Oligonucleotide
tacccattcaaaatattactcgact

SEQ ID NO: 9116 - DNA, 25 bp, Artificial Sequence
  Synthetic Oligonucleotide
ctaccatctcaactgagtagtccgc

SEQ ID NO: 9117 - DNA, 25 bp, Artificial Sequence
  Synthetic Oligonucleotide
ccaccacttcgagatcggtgcgagc

SEQ ID NO: 9118 - DNA, 25 bp, Artificial Sequence
  Synthetic Oligonucleotide
ccattagtcggagactaaggcggcg

SEQ ID NO: 9119 - DNA, 25 bp, Artificial Sequence
  Synthetic Oligonucleotide
aaatcatcggtagaacaggtctgcg

SEQ ID NO: 9120 - DNA, 25 bp, Artificial Sequence
  Synthetic Oligonucleotide
aaacattctggtgtacatattccgg

SEQ ID NO: 9121 - DNA, 25 bp, Artificial Sequence
  Synthetic Oligonucleotide
aatagggttgatggtaattgtctcc

SEQ ID NO: 9122 - DNA, 25 bp, Artificial Sequence
  Synthetic Oligonucleotide
ctgggtatgagtctgtgtttcgacc

SEQ ID NO: 9123 - DNA, 25 bp, Artificial Sequence
  Synthetic Oligonucleotide
ggctacgagagggtgtagttcgcgc

SEQ ID NO: 9124 - DNA, 25 bp, Artificial Sequence
  Synthetic Oligonucleotide
gtgttccacgagggggtgtagtcgc

SEQ ID NO: 9125 - DNA, 25 bp, Artificial Sequence
  Synthetic Oligonucleotide
ttgccgctctagaagtagcttgcgc

SEQ ID NO: 9126 - DNA, 25 bp, Artificial Sequence
  Synthetic Oligonucleotide
tcgaaggctctactctgctctagcc

SEQ ID NO: 9127 - DNA, 25 bp, Artificial Sequence
  Synthetic Oligonucleotide
tgctgaggtccactactggctaccc

SEQ ID NO: 9128 - DNA, 25 bp, Artificial Sequence
  Synthetic Oligonucleotide
acttctgaggcctcctgagttgctg

SEQ ID NO: 9129 - DNA, 25 bp, Artificial Sequence
  Synthetic Oligonucleotide
acttctgcggcctcctgaggtgctg

SEQ ID NO: 9130 - DNA, 25 bp, Artificial Sequence
  Synthetic Oligonucleotide
agagctgctgcctcataggcagctg

SEQ ID NO: 9131 - DNA, 25 bp, Artificial Sequence
  Synthetic Oligonucleotide
agagcagcccctagaagagcggcat

SEQ ID NO: 9132 - DNA, 25 bp, Artificial Sequence
  Synthetic Oligonucleotide
gccagaacccgtcgagcaaccgcat

SEQ ID NO: 9133 - DNA, 25 bp, Artificial Sequence
  Synthetic Oligonucleotide
acagtttcctgtcacgcaaccgaag

SEQ ID NO: 9134 - DNA, 25 bp, Artificial Sequence
  Synthetic Oligonucleotide
acagcctctacatgagcatccagcg

SEQ ID NO: 9135 - DNA, 25 bp, Artificial Sequence
  Synthetic Oligonucleotide
gagcagagctcctaggaatcgaagg

SEQ ID NO: 9136 - DNA, 25 bp, Artificial Sequence
  Synthetic Oligonucleotide
tcccaggcccgatggtacaaccaag

SEQ ID NO: 9137 - DNA, 25 bp, Artificial Sequence
  Synthetic Oligonucleotide
cccagtcttccgatgttccctaaag

SEQ ID NO: 9138 - DNA, 25 bp, Artificial Sequence
  Synthetic Oligonucleotide
cagatcccgttgaatcgtgtcgaag

SEQ ID NO: 9139 - DNA, 25 bp, Artificial Sequence
  Synthetic Oligonucleotide
ggctactcgttcataactgttatag

SEQ ID NO: 9140 - DNA, 25 bp, Artificial Sequence
  Synthetic Oligonucleotide
acggcacgcgccttagaggctgtag

SEQ ID NO: 9141 - DNA, 25 bp, Artificial Sequence
  Synthetic Oligonucleotide
cagggacccgctgatgaggctacag

SEQ ID NO: 9142 - DNA, 25 bp, Artificial Sequence
  Synthetic Oligonucleotide
gagcactcgtcgtgacctcactacg

SEQ ID NO: 9143 - DNA, 25 bp, Artificial Sequence
  Synthetic Oligonucleotide
cacacctgcggtgagacgtacctcg

SEQ ID NO: 9144 - DNA, 25 bp, Artificial Sequence
  Synthetic Oligonucleotide
atgccatgaggccgcgtgcgtccag

SEQ ID NO: 9145 - DNA, 25 bp, Artificial Sequence
  Synthetic Oligonucleotide
tccgaagtaggttccggcggtacag

SEQ ID NO: 9146 - DNA, 25 bp, Artificial Sequence
  Synthetic Oligonucleotide
tgctgaagaggtgcctgctcgaact

SEQ ID NO: 9147 - DNA, 25 bp, Artificial Sequence
  Synthetic Oligonucleotide
tctttagtggcggaagatcgtacct

SEQ ID NO: 9148 - DNA, 25 bp, Artificial Sequence
  Synthetic Oligonucleotide
gcagctagtacgggtaaagctgttt

SEQ ID NO: 9149 - DNA, 25 bp, Artificial Sequence
  Synthetic Oligonucleotide
cggtgtgcgtcgtgtaacatcttcc

SEQ ID NO: 9150 - DNA, 25 bp, Artificial Sequence
  Synthetic Oligonucleotide
aagaaggtggtgtctaattctgacc

SEQ ID NO: 9151 - DNA, 25 bp, Artificial Sequence
  Synthetic Oligonucleotide
aaaatgtttggaagtctttcgtacc

SEQ ID NO: 9152 - DNA, 25 bp, Artificial Sequence
  Synthetic Oligonucleotide
actagaactggatgtaccttctacc

SEQ ID NO: 9153 - DNA, 25 bp, Artificial Sequence
  Synthetic Oligonucleotide
caaccataggagctaatatctacct

SEQ ID NO: 9154 - DNA, 25 bp, Artificial Sequence
  Synthetic Oligonucleotide
ctagtccactaggggtttccgtacc

SEQ ID NO: 9155 - DNA, 25 bp, Artificial Sequence
  Synthetic Oligonucleotide
accgtccctgagcggtcgtcactcc

SEQ ID NO: 9156 - DNA, 25 bp, Artificial Sequence
  Synthetic Oligonucleotide
gtacttcagaggctccgtcagtcgc

SEQ ID NO: 9157 - DNA, 25 bp, Artificial Sequence
  Synthetic Oligonucleotide
ttcgacgagtcgccgctcgtgtacc

SEQ ID NO: 9158 - DNA, 25 bp, Artificial Sequence
  Synthetic Oligonucleotide
tgcttagtacgttccgcgcacggcc

SEQ ID NO: 9159 - DNA, 25 bp, Artificial Sequence
  Synthetic Oligonucleotide
tatgggacgacttccgggcgctcgc

SEQ ID NO: 9160 - DNA, 25 bp, Artificial Sequence
  Synthetic Oligonucleotide
tcctggggacctgtgagacggtcgc

SEQ ID NO: 9161 - DNA, 25 bp, Artificial Sequence
  Synthetic Oligonucleotide
cctggggacctcagagacggtcgcc

SEQ ID NO: 9162 - DNA, 25 bp, Artificial Sequence
  Synthetic Oligonucleotide
gtgtcgcgcgccatcaagaggcgcc

SEQ ID NO: 9163 - DNA, 25 bp, Artificial Sequence
  Synthetic Oligonucleotide
tcgtcgtgtccctcgaggagtcccc

SEQ ID NO: 9164 - DNA, 25 bp, Artificial Sequence
  Synthetic Oligonucleotide
cttacgtctccggaacaggtccgcc

SEQ ID NO: 9165 - DNA, 25 bp, Artificial Sequence
  Synthetic Oligonucleotide
acagtacctactcgaaccggtcccc

SEQ ID NO: 9166 - DNA, 25 bp, Artificial Sequence
  Synthetic Oligonucleotide
tgtgcctcatgatcgcgagtcctcc

SEQ ID NO: 9167 - DNA, 25 bp, Artificial Sequence
  Synthetic Oligonucleotide
tgtgccttatgatcgcgagtccacc

SEQ ID NO: 9168 - DNA, 25 bp, Artificial Sequence
  Synthetic Oligonucleotide
tggctttatgttggtcgtcgacacc

SEQ ID NO: 9169 - DNA, 25 bp, Artificial Sequence
  Synthetic Oligonucleotide
aggactcctctgaggtgcgacaccg

SEQ ID NO: 9170 - DNA, 25 bp, Artificial Sequence
  Synthetic Oligonucleotide
gaggctcatctgacggtgacacgcc

SEQ ID NO: 9171 - DNA, 25 bp, Artificial Sequence
  Synthetic Oligonucleotide
ggctctagtctggtctagcccgcgc

SEQ ID NO: 9172 - DNA, 25 bp, Artificial Sequence
  Synthetic Oligonucleotide
agggctcatcgagcctaatgtccgc

SEQ ID NO: 9173 - DNA, 25 bp, Artificial Sequence
  Synthetic Oligonucleotide
agggtttcacgagcctaatgtccgc

SEQ ID NO: 9174 - DNA, 25 bp, Artificial Sequence
  Synthetic Oligonucleotide
gcgcttcggccgcaacgtgtaccgc

SEQ ID NO: 9175 - DNA, 25 bp, Artificial Sequence
  Synthetic Oligonucleotide
ggtctagtggtcccgagtatttcgc

SEQ ID NO: 9176 - DNA, 25 bp, Artificial Sequence
  Synthetic Oligonucleotide
tcgagctgtaggtgcgagacctccc

SEQ ID NO: 9177 - DNA, 25 bp, Artificial Sequence
  Synthetic Oligonucleotide
tcgagctgtaggtgcgagacctccc

SEQ ID NO: 9178 - DNA, 25 bp, Artificial Sequence
  Synthetic Oligonucleotide
cgactctgttgttgacaactccacc

SEQ ID NO: 9179 - DNA, 25 bp, Artificial Sequence
  Synthetic Oligonucleotide
ttctatctcttttccacgcctgcgc

SEQ ID NO: 9180 - DNA, 25 bp, Artificial Sequence
  Synthetic Oligonucleotide
tttcgatgatttcaccatgacccgc

SEQ ID NO: 9181 - DNA, 25 bp, Artificial Sequence
  Synthetic Oligonucleotide
ttcgatgatttgtccatgacccgcg

SEQ ID NO: 9182 - DNA, 25 bp, Artificial Sequence
  Synthetic Oligonucleotide
tcgatgatttgagcatgacccgcgc

SEQ ID NO: 9183 - DNA, 25 bp, Artificial Sequence
  Synthetic Oligonucleotide
gtgggtttcgcacagagacccgagg

SEQ ID NO: 9184 - DNA, 25 bp, Artificial Sequence
  Synthetic Oligonucleotide
cgggttctacggcaagtcacccggg

SEQ ID NO: 9185 - DNA, 25 bp, Artificial Sequence
  Synthetic Oligonucleotide
aggttgctggacctcgacaccgcag

SEQ ID NO: 9186 - DNA, 25 bp, Artificial Sequence
  Synthetic Oligonucleotide
caacttcgatggaacaccaacgacc

SEQ ID NO: 9187 - DNA, 25 bp, Artificial Sequence
  Synthetic Oligonucleotide
acatttgtgaggaaccgccagacct

SEQ ID NO: 9188 - DNA, 25 bp, Artificial Sequence
  Synthetic Oligonucleotide
ctatctgtagagcacccagtcaacc

SEQ ID NO: 9189 - DNA, 25 bp, Artificial Sequence
  Synthetic Oligonucleotide
gagtatctagagtcccactacaacc

SEQ ID NO: 9190 - DNA, 25 bp, Artificial Sequence
  Synthetic Oligonucleotide
gggttatattcggtctactacatcc

SEQ ID NO: 9191 - DNA, 25 bp, Artificial Sequence
  Synthetic Oligonucleotide
aagttaacttctactaactcgtcgc

SEQ ID NO: 9192 - DNA, 25 bp, Artificial Sequence
  Synthetic Oligonucleotide
ctaaagaaggtttatacaactgtcc

SEQ ID NO: 9193 - DNA, 25 bp, Artificial Sequence
  Synthetic Oligonucleotide
agcaaaagtcgttgaacaagttcat

SEQ ID NO: 9194 - DNA, 25 bp, Artificial Sequence
  Synthetic Oligonucleotide
gcgaagaactacagggaaagttgct

SEQ ID NO: 9195 - DNA, 25 bp, Artificial Sequence
  Synthetic Oligonucleotide
cgaaggactcaagaaactgtagagt

SEQ ID NO: 9196 - DNA, 25 bp, Artificial Sequence
  Synthetic Oligonucleotide
acaatgctctacgaacaacttcgat

SEQ ID NO: 9197 - DNA, 25 bp, Artificial Sequence
  Synthetic Oligonucleotide
tccaatgcctatttcaagtactgtt

SEQ ID NO: 9198 - DNA, 16 bp, Artificial Sequence
  Synthetic Oligonucleotide
cttgccatcgtagaac

SEQ ID NO: 9199 - DNA, 18 bp, Artificial Sequence
  Synthetic Oligonucleotide
acttgccatcgtagaact

SEQ ID NO: 9200 - DNA, 25 bp, Artificial Sequence
  Synthetic Oligonucleotide
tgtgaagtggcctggtaagttagcc

SEQ ID NO: 9201 - DNA, 25 bp, Artificial Sequence
  Synthetic Oligonucleotide
tgtgaagtggcctggtaagttagcc

SEQ ID NO: 9202 - DNA, 25 bp, Artificial Sequence
  Synthetic Oligonucleotide
ggtcacctgaggtgctacataagcc

SEQ ID NO: 9203 - DNA, 25 bp, Artificial Sequence
  Synthetic Oligonucleotide
ggaccgtcgggtgagcacaaccgcc

SEQ ID NO: 9204 - DNA, 25 bp, Artificial Sequence
  Synthetic Oligonucleotide
gggtcgagtgcaagggataaccacc

SEQ ID NO: 9205 - DNA, 25 bp, Artificial Sequence
  Synthetic Oligonucleotide
gggtcgagtgcaagggataaccacc

SEQ ID NO: 9206 - DNA, 25 bp, Artificial Sequence
  Synthetic Oligonucleotide
gagaacgagtcacaggaacgacccc

SEQ ID NO: 9207 - DNA, 25 bp, Artificial Sequence
  Synthetic Oligonucleotide
gaaggagaacacgagaacgaccccg

SEQ ID NO: 9208 - DNA, 25 bp, Artificial Sequence
  Synthetic Oligonucleotide
cagtgtaaacgagacggaacttcgc

SEQ ID NO: 9209 - DNA, 20 bp, Artificial Sequence
  Synthetic Oligonucleotide
attaaagaaagaggagttga

SEQ ID NO: 9210 - DNA, 20 bp, Artificial Sequence
  Synthetic Oligonucleotide
attaaagagagaggagttga

SEQ ID NO: 9211 - DNA, 20 bp, Artificial Sequence
  Synthetic Oligonucleotide
attaaagaaagaggagttga

SEQ ID NO: 9212 - DNA, 20 bp, Artificial Sequence
  Synthetic Oligonucleotide
attaaagatagaggagttga

SEQ ID NO: 9213 - DNA, 20 bp, Artificial Sequence
  Synthetic Oligonucleotide
attaaagaaagaggagttga

SEQ ID NO: 9214 - DNA, 20 bp, Artificial Sequence
  Synthetic Oligonucleotide
attgacaacgcacggatgta

SEQ ID NO: 9215 - DNA, 20 bp, Artificial Sequence
  Synthetic Oligonucleotide
attgacaacgtacggatgta

SEQ ID NO: 9216 - DNA, 20 bp, Artificial Sequence
  Synthetic Oligonucleotide
attgacaacgtacggatgta

SEQ ID NO: 9217 - DNA, 20 bp, Artificial Sequence
  Synthetic Oligonucleotide
attgacaacgaacggatgta

SEQ ID NO: 9218 - DNA, 20 bp, Artificial Sequence
  Synthetic Oligonucleotide
attgacaacgcacggatgta

SEQ ID NO: 9219 - DNA, 20 bp, Artificial Sequence
  Synthetic Oligonucleotide
taaaggagaacagaagacct

SEQ ID NO: 9220 - DNA, 20 bp, Artificial Sequence
  Synthetic Oligonucleotide
taaaggagatcagaagacct

SEQ ID NO: 9221 - DNA, 20 bp, Artificial Sequence
  Synthetic Oligonucleotide
taaaggagatcagaagacct

SEQ ID NO: 9222 - DNA, 20 bp, Artificial Sequence
  Synthetic Oligonucleotide
taaaggagaacagaagacct

SEQ ID NO: 9223 - DNA, 20 bp, Artificial Sequence
  Synthetic Oligonucleotide
taaaggagagcagaagacct

SEQ ID NO: 9224 - DNA, 20 bp, Artificial Sequence
  Synthetic Oligonucleotide
ttcataagccacaggacggt

SEQ ID NO: 9225 - DNA, 20 bp, Artificial Sequence
  Synthetic Oligonucleotide
ttcataaggcacaggacggt

SEQ ID NO: 9226 - DNA, 20 bp, Artificial Sequence
  Synthetic Oligonucleotide
ttcataagccacaggacggt

SEQ ID NO: 9227 - DNA, 20 bp, Artificial Sequence
  Synthetic Oligonucleotide
ttcataagtcacaggacggt

SEQ ID NO: 9228 - DNA, 20 bp, Artificial Sequence
  Synthetic Oligonucleotide
ttcataagacacaggacggt

SEQ ID NO: 9229 - DNA, 20 bp, Artificial Sequence
  Synthetic Oligonucleotide
gaccacgcagggatatgtcg

SEQ ID NO: 9230 - DNA, 20 bp, Artificial Sequence
  Synthetic Oligonucleotide
gaccacgcagggatatgtcg

SEQ ID NO: 9231 - DNA, 20 bp, Artificial Sequence
  Synthetic Oligonucleotide
gaccacgcagggatatgtcg

SEQ ID NO: 9232 - DNA, 20 bp, Artificial Sequence
  Synthetic Oligonucleotide
gaccacgtagggatatgtcg

SEQ ID NO: 9233 - DNA, 20 bp, Artificial Sequence
  Synthetic Oligonucleotide
gaccacgtagggatatgtcg

SEQ ID NO: 9234 - DNA, 20 bp, Artificial Sequence
  Synthetic Oligonucleotide
cacctgtaaggtgtgacacc

SEQ ID NO: 9235 - DNA, 20 bp, Artificial Sequence
  Synthetic Oligonucleotide
cacctgtaaggcgtgacacc

SEQ ID NO: 9236 - DNA, 20 bp, Artificial Sequence
  Synthetic Oligonucleotide
cacctgtaaggcgtgacacc

SEQ ID NO: 9237 - DNA, 20 bp, Artificial Sequence
  Synthetic Oligonucleotide
cacctgtaaggtgtgacacc

SEQ ID NO: 9238 - DNA, 20 bp, Artificial Sequence
  Synthetic Oligonucleotide
cacctgtaaggtgtgacacc

SEQ ID NO: 9239 - DNA, 20 bp, Artificial Sequence
  Synthetic Oligonucleotide
tcgagacgggcgtaagtctg

SEQ ID NO: 9240 - DNA, 20 bp, Artificial Sequence
  Synthetic Oligonucleotide
tcgagacgggtgtaagtctg

SEQ ID NO: 9241 - DNA, 20 bp, Artificial Sequence
  Synthetic Oligonucleotide
tcgagacgggcgtaagtctg

SEQ ID NO: 9242 - DNA, 20 bp, Artificial Sequence
  Synthetic Oligonucleotide
tcgagacgggcgtaagtctg

SEQ ID NO: 9243 - DNA, 20 bp, Artificial Sequence
  Synthetic Oligonucleotide
tcgagacgggcgtaagtctg

SEQ ID NO: 9244 - DNA, 20 bp, Artificial Sequence
  Synthetic Oligonucleotide
gacacagggaggtctaccag

SEQ ID NO: 9245 - DNA, 20 bp, Artificial Sequence
  Synthetic Oligonucleotide
gacacagggaggtctaccag

SEQ ID NO: 9246 - DNA, 20 bp, Artificial Sequence
  Synthetic Oligonucleotide
gacacaggaaggtctaccag

SEQ ID NO: 9247 - DNA, 20 bp, Artificial Sequence
  Synthetic Oligonucleotide
gacacaggtaggtctaccag

SEQ ID NO: 9248 - DNA, 20 bp, Artificial Sequence
  Synthetic Oligonucleotide
gacacagggaggtctaccag

SEQ ID NO: 9249 - DNA, 20 bp, Artificial Sequence
  Synthetic Oligonucleotide
gttcggaagggatctttagt

SEQ ID NO: 9250 - DNA, 20 bp, Artificial Sequence
  Synthetic Oligonucleotide
gttcggaaggtatctttagt

SEQ ID NO: 9251 - DNA, 20 bp, Artificial Sequence
  Synthetic Oligonucleotide
gttcggaaggaatctttagt

SEQ ID NO: 9252 - DNA, 20 bp, Artificial Sequence
  Synthetic Oligonucleotide
gttcggaaggaatctttagt

SEQ ID NO: 9253 - DNA, 20 bp, Artificial Sequence
  Synthetic Oligonucleotide
gttcggaagggatctttagt

SEQ ID NO: 9254 - DNA, 20 bp, Artificial Sequence
  Synthetic Oligonucleotide
ctccccgcaggagtcgttac

SEQ ID NO: 9255 - DNA, 20 bp, Artificial Sequence
  Synthetic Oligonucleotide
ctccccgtaggagtcgttac

SEQ ID NO: 9256 - DNA, 20 bp, Artificial Sequence
  Synthetic Oligonucleotide
ctccccgtaggagtcgttac

SEQ ID NO: 9257 - DNA, 20 bp, Artificial Sequence
  Synthetic Oligonucleotide
ctccccgcaggagtcgttac

SEQ ID NO: 9258 - DNA, 20 bp, Artificial Sequence
  Synthetic Oligonucleotide
ctccccgtaggagtcgttac

SEQ ID NO: 9259 - DNA, 20 bp, Artificial Sequence
  Synthetic Oligonucleotide
gacggtgaaggttgtactct

SEQ ID NO: 9260 - DNA, 20 bp, Artificial Sequence
  Synthetic Oligonucleotide
gacggtgaaggatgtactct

SEQ ID NO: 9261 - DNA, 20 bp, Artificial Sequence
  Synthetic Oligonucleotide
gacggtgaaggatgtactct

SEQ ID NO: 9262 - DNA, 20 bp, Artificial Sequence
  Synthetic Oligonucleotide
gacggtgaagggtgtactct

SEQ ID NO: 9263 - DNA, 20 bp, Artificial Sequence
  Synthetic Oligonucleotide
gacggtgaagggtgtactct

SEQ ID NO: 9264 - DNA, 20 bp, Artificial Sequence
  Synthetic Oligonucleotide
ccctagtcggtgtttgcagc

SEQ ID NO: 9265 - DNA, 20 bp, Artificial Sequence
  Synthetic Oligonucleotide
ccctagtcggtgtttgcagc

SEQ ID NO: 9266 - DNA, 20 bp, Artificial Sequence
  Synthetic Oligonucleotide
ccctagtcggtgtttgcagc

SEQ ID NO: 9267 - DNA, 20 bp, Artificial Sequence
  Synthetic Oligonucleotide
ccctagtcggtgtttgcagc

SEQ ID NO: 9268 - DNA, 20 bp, Artificial Sequence
  Synthetic Oligonucleotide
ccctagtcggagtttgcagc

SEQ ID NO: 9269 - DNA, 25 bp, Artificial Sequence
  Synthetic Oligonucleotide
tggcacaggactcctctgtggtgcg

SEQ ID NO: 9270 - DNA, 25 bp, Artificial Sequence
  Synthetic Oligonucleotide
gggcaacagctgctgctcgcgtcgc

SEQ ID NO: 9271 - DNA, 25 bp, Artificial Sequence
  Synthetic Oligonucleotide
agatgcgtaaagtggcgatgtgtcc

SEQ ID NO: 9272 - DNA, 25 bp, Artificial Sequence
  Synthetic Oligonucleotide
taataaggatcgacgccataggtcc

SEQ ID NO: 9273 - DNA, 25 bp, Artificial Sequence
  Synthetic Oligonucleotide
tacaggagccgcacgacgtggtccg

SEQ ID NO: 9274 - DNA, 25 bp, Artificial Sequence
  Synthetic Oligonucleotide
tcctagagccgcagctcgttgcgcg

SEQ ID NO: 9275 - DNA, 25 bp, Artificial Sequence
  Synthetic Oligonucleotide
acttacaacatcagccggtcgcacg

SEQ ID NO: 9276 - DNA, 25 bp, Artificial Sequence
  Synthetic Oligonucleotide
acttacaacatcagccgttcgcacg

SEQ ID NO: 9277 - DNA, 25 bp, Artificial Sequence
  Synthetic Oligonucleotide
ttagttcagtcatctacgtctccgc

SEQ ID NO: 9278 - DNA, 25 bp, Artificial Sequence
  Synthetic Oligonucleotide
ttgagtgagacatctagtctgaccg

SEQ ID NO: 9279 - DNA, 25 bp, Artificial Sequence
  Synthetic Oligonucleotide
gagttgtaggagttttatcaaccgt

SEQ ID NO: 9280 - DNA, 25 bp, Artificial Sequence
  Synthetic Oligonucleotide
agttctatggagagaacctaactcg

SEQ ID NO: 9281 - DNA, 25 bp, Artificial Sequence
  Synthetic Oligonucleotide
gtttctagtcggagacgaccagacc

SEQ ID NO: 9282 - DNA, 25 bp, Artificial Sequence
  Synthetic Oligonucleotide
ttcgacatcggtgcgagccagtcct

SEQ ID NO: 9283 - DNA, 25 bp, Artificial Sequence
  Synthetic Oligonucleotide
atcaggtccttcagtctctacgtcc

SEQ ID NO: 9284 - DNA, 25 bp, Artificial Sequence
  Synthetic Oligonucleotide
gtgtccgtcgtctttcttatcttcc

SEQ ID NO: 9285 - DNA, 25 bp, Artificial Sequence
  Synthetic Oligonucleotide
cggttctcgcgctttgtcgtcttcc

SEQ ID NO: 9286 - DNA, 25 bp, Artificial Sequence
  Synthetic Oligonucleotide
cggttcgaccggtcttcgtcctgcg

SEQ ID NO: 9287 - DNA, 25 bp, Artificial Sequence
  Synthetic Oligonucleotide
ctgtcgcgggaccttacgtctccgc

SEQ ID NO: 9288 - DNA, 25 bp, Artificial Sequence
  Synthetic Oligonucleotide
ctgtctcgctaacggtacgaatcgc

SEQ ID NO: 9289 - DNA, 25 bp, Artificial Sequence
  Synthetic Oligonucleotide
gaccttctgcagttggacgtcccgc

SEQ ID NO: 9290 - DNA, 25 bp, Artificial Sequence
  Synthetic Oligonucleotide
atactcgtccagtgtatcaagcccc

SEQ ID NO: 9291 - DNA, 25 bp, Artificial Sequence
  Synthetic Oligonucleotide
cgtacctcggtatttaaagcacacc

SEQ ID NO: 9292 - DNA, 25 bp, Artificial Sequence
  Synthetic Oligonucleotide
cacaaccttgttatggactacaccg

SEQ ID NO: 9293 - DNA, 25 bp, Artificial Sequence
  Synthetic Oligonucleotide
acaaccttgttatggactacaccgc

SEQ ID NO: 9294 - DNA, 25 bp, Artificial Sequence
  Synthetic Oligonucleotide
acacacctcgtttctttagtggcgc

SEQ ID NO: 9295 - DNA, 25 bp, Artificial Sequence
  Synthetic Oligonucleotide
gcgataacctcgaccttaatggcgc

SEQ ID NO: 9296 - DNA, 25 bp, Artificial Sequence
  Synthetic Oligonucleotide
gtctcatcttgggtcctaatggcgc

SEQ ID NO: 9297 - DNA, 25 bp, Artificial Sequence
  Synthetic Oligonucleotide
ttcgtgcattgggccaaagcgcgag

SEQ ID NO: 9298 - DNA, 25 bp, Artificial Sequence
  Synthetic Oligonucleotide
tggtactatggaaccacagaaccag

SEQ ID NO: 9299 - DNA, 25 bp, Artificial Sequence
  Synthetic Oligonucleotide
caggactatgaaacccacatagacc

SEQ ID NO: 9300 - DNA, 25 bp, Artificial Sequence
  Synthetic Oligonucleotide
aagggtatgaacagaccataaacct

SEQ ID NO: 9301 - DNA, 25 bp, Artificial Sequence
  Synthetic Oligonucleotide
acggtgttacaaaacatcacaacct

SEQ ID NO: 9302 - DNA, 25 bp, Artificial Sequence
  Synthetic Oligonucleotide
aacggtgttacaaaacatcacaacc

SEQ ID NO: 9303 - DNA, 25 bp, Artificial Sequence
  Synthetic Oligonucleotide
gctggtactatggaaccacagaacc

SEQ ID NO: 9304 - DNA, 25 bp, Artificial Sequence
  Synthetic Oligonucleotide
tctaggtttgcttcctaccgtaccc

SEQ ID NO: 9305 - DNA, 25 bp, Artificial Sequence
  Synthetic Oligonucleotide
tagtgtttgtacccccgtagtcgcc

SEQ ID NO: 9306 - DNA, 25 bp, Artificial Sequence
  Synthetic Oligonucleotide
catgtactgttccacgccgagggat

SEQ ID NO: 9307 - DNA, 25 bp, Artificial Sequence
  Synthetic Oligonucleotide
catagagactggtctcagtaggaat

SEQ ID NO: 9308 - DNA, 25 bp, Artificial Sequence
  Synthetic Oligonucleotide
gtagagtatcaggtccaagttaagt

SEQ ID NO: 9309 - DNA, 25 bp, Artificial Sequence
  Synthetic Oligonucleotide
gtaacggtcattccgcagtcgtgag

SEQ ID NO: 9310 - DNA, 25 bp, Artificial Sequence
  Synthetic Oligonucleotide
ccgaaaggcttttccatagtgtacg

SEQ ID NO: 9311 - DNA, 18 bp, Artificial Sequence
  Synthetic Oligonucleotide
acttgccatcgtagaact

SEQ ID NO: 9312 - DNA, 20 bp, Artificial Sequence
  Synthetic Oligonucleotide
gacttgccatcgtagaactg

SEQ ID NO: 9313 - DNA, 25 bp, Artificial Sequence
  Synthetic Oligonucleotide
tgtgaagtggccaggtaagttagcc

SEQ ID NO: 9314 - DNA, 25 bp, Artificial Sequence
  Synthetic Oligonucleotide
tgtgaagtggccaggtaagttagcc

SEQ ID NO: 9315 - DNA, 25 bp, Artificial Sequence
  Synthetic Oligonucleotide
ggtcacctgaggagctacataagcc

SEQ ID NO: 9316 - DNA, 25 bp, Artificial Sequence
  Synthetic Oligonucleotide
ggaccgtcgggtcagcacaaccgcc

SEQ ID NO: 9317 - DNA, 25 bp, Artificial Sequence
  Synthetic Oligonucleotide
gggtcgagtgcatgggataaccacc

SEQ ID NO: 9318 - DNA, 25 bp, Artificial Sequence
  Synthetic Oligonucleotide
gggtcgagtgcatgggataaccacc

SEQ ID NO: 9319 - DNA, 25 bp, Artificial Sequence
  Synthetic Oligonucleotide
gagaacgagtcagaggaacgacccc

SEQ ID NO: 9320 - DNA, 25 bp, Artificial Sequence
  Synthetic Oligonucleotide
gaaggagaacaccagaacgaccccg

SEQ ID NO: 9321 - DNA, 25 bp, Artificial Sequence
  Synthetic Oligonucleotide
cagtgtaaacgacacggaacttcgc

SEQ ID NO: 9322 - DNA, 20 bp, Artificial Sequence
  Synthetic Oligonucleotide
attaaagatagaggagttga

SEQ ID NO: 9323 - DNA, 20 bp, Artificial Sequence
  Synthetic Oligonucleotide
attaaagacagaggagttga

SEQ ID NO: 9324 - DNA, 20 bp, Artificial Sequence
  Synthetic Oligonucleotide
attaaagatagaggagttga

SEQ ID NO: 9325 - DNA, 20 bp, Artificial Sequence
  Synthetic Oligonucleotide
attaaagagagaggagttga

SEQ ID NO: 9326 - DNA, 20 bp, Artificial Sequence
  Synthetic Oligonucleotide
attaaagatagaggagttga

SEQ ID NO: 9327 - DNA, 20 bp, Artificial Sequence
  Synthetic Oligonucleotide
attgacaacgaacggatgta

SEQ ID NO: 9328 - DNA, 20 bp, Artificial Sequence
  Synthetic Oligonucleotide
attgacaacggacggatgta

SEQ ID NO: 9329 - DNA, 20 bp, Artificial Sequence
  Synthetic Oligonucleotide
attgacaacggacggatgta

SEQ ID NO: 9330 - DNA, 20 bp, Artificial Sequence
  Synthetic Oligonucleotide
attgacaacgtacggatgta

SEQ ID NO: 9331 - DNA, 20 bp, Artificial Sequence
  Synthetic Oligonucleotide
attgacaacgaacggatgta

SEQ ID NO: 9332 - DNA, 20 bp, Artificial Sequence
  Synthetic Oligonucleotide
taaaggagatcagaagacct

SEQ ID NO: 9333 - DNA, 20 bp, Artificial Sequence
  Synthetic Oligonucleotide
taaaggagagcagaagacct

SEQ ID NO: 9334 - DNA, 20 bp, Artificial Sequence
  Synthetic Oligonucleotide
taaaggagagcagaagacct

SEQ ID NO: 9335 - DNA, 20 bp, Artificial Sequence
  Synthetic Oligonucleotide
taaaggagatcagaagacct

SEQ ID NO: 9336 - DNA, 20 bp, Artificial Sequence
  Synthetic Oligonucleotide
taaaggagaccagaagacct

SEQ ID NO: 9337 - DNA, 20 bp, Artificial Sequence
  Synthetic Oligonucleotide
ttcataagacacaggacggt

SEQ ID NO: 9338 - DNA, 20 bp, Artificial Sequence
  Synthetic Oligonucleotide
ttcataagccacaggacggt

SEQ ID NO: 9339 - DNA, 20 bp, Artificial Sequence
  Synthetic Oligonucleotide
ttcataagacacaggacggt

SEQ ID NO: 9340 - DNA, 20 bp, Artificial Sequence
  Synthetic Oligonucleotide
ttcataaggcacaggacggt

SEQ ID NO: 9341 - DNA, 20 bp, Artificial Sequence
  Synthetic Oligonucleotide
ttcataagtcacaggacggt

SEQ ID NO: 9342 - DNA, 20 bp, Artificial Sequence
  Synthetic Oligonucleotide
gaccacgaagggatatgtcg

SEQ ID NO: 9343 - DNA, 20 bp, Artificial Sequence
  Synthetic Oligonucleotide
gaccacgaagggatatgtcg

SEQ ID NO: 9344 - DNA, 20 bp, Artificial Sequence
  Synthetic Oligonucleotide
gaccacgaagggatatgtcg

SEQ ID NO: 9345 - DNA, 20 bp, Artificial Sequence
  Synthetic Oligonucleotide
gaccacggagggatatgtcg

SEQ ID NO: 9346 - DNA, 20 bp, Artificial Sequence
  Synthetic Oligonucleotide
gaccacggagggatatgtcg

SEQ ID NO: 9347 - DNA, 20 bp, Artificial Sequence
  Synthetic Oligonucleotide
cacctgtaaggggtgacacc

SEQ ID NO: 9348 - DNA, 20 bp, Artificial Sequence
  Synthetic Oligonucleotide
cacctgtaaggagtgacacc

SEQ ID NO: 9349 - DNA, 20 bp, Artificial Sequence
  Synthetic Oligonucleotide
cacctgtaaggagtgacacc

SEQ ID NO: 9350 - DNA, 20 bp, Artificial Sequence
  Synthetic Oligonucleotide
cacctgtaaggggtgacacc

SEQ ID NO: 9351 - DNA, 20 bp, Artificial Sequence
  Synthetic Oligonucleotide
cacctgtaaggggtgacacc

SEQ ID NO: 9352 - DNA, 20 bp, Artificial Sequence
  Synthetic Oligonucleotide
tcgagacgggagtaagtctg

SEQ ID NO: 9353 - DNA, 20 bp, Artificial Sequence
  Synthetic Oligonucleotide
tcgagacgggggtaagtctg

SEQ ID NO: 9354 - DNA, 20 bp, Artificial Sequence
  Synthetic Oligonucleotide
tcgagacgggagtaagtctg

SEQ ID NO: 9355 - DNA, 20 bp, Artificial Sequence
  Synthetic Oligonucleotide
tcgagacgggagtaagtctg

SEQ ID NO: 9356 - DNA, 20 bp, Artificial Sequence
  Synthetic Oligonucleotide
tcgagacgggagtaagtctg

SEQ ID NO: 9357 - DNA, 20 bp, Artificial Sequence
  Synthetic Oligonucleotide
gacacaggcaggtctaccag

SEQ ID NO: 9358 - DNA, 20 bp, Artificial Sequence
  Synthetic Oligonucleotide
gacacaggcaggtctaccag

SEQ ID NO: 9359 - DNA, 20 bp, Artificial Sequence
  Synthetic Oligonucleotide
gacacaggtaggtctaccag

SEQ ID NO: 9360 - DNA, 20 bp, Artificial Sequence
  Synthetic Oligonucleotide
gacacagggaggtctaccag

SEQ ID NO: 9361 - DNA, 20 bp, Artificial Sequence
  Synthetic Oligonucleotide
gacacaggcaggtctaccag

SEQ ID NO: 9362 - DNA, 20 bp, Artificial Sequence
  Synthetic Oligonucleotide
gttcggaaggcatctttagt

SEQ ID NO: 9363 - DNA, 20 bp, Artificial Sequence
  Synthetic Oligonucleotide
gttcggaagggatctttagt

SEQ ID NO: 9364 - DNA, 20 bp, Artificial Sequence
  Synthetic Oligonucleotide
gttcggaaggtatctttagt

SEQ ID NO: 9365 - DNA, 20 bp, Artificial Sequence
  Synthetic Oligonucleotide
gttcggaaggtatctttagt

SEQ ID NO: 9366 - DNA, 20 bp, Artificial Sequence
  Synthetic Oligonucleotide
gttcggaaggcatctttagt

SEQ ID NO: 9367 - DNA, 20 bp, Artificial Sequence
  Synthetic Oligonucleotide
ctccccgaaggagtcgttac

SEQ ID NO: 9368 - DNA, 20 bp, Artificial Sequence
  Synthetic Oligonucleotide
ctccccggaggagtcgttac

SEQ ID NO: 9369 - DNA, 20 bp, Artificial Sequence
  Synthetic Oligonucleotide
ctccccggaggagtcgttac

SEQ ID NO: 9370 - DNA, 20 bp, Artificial Sequence
  Synthetic Oligonucleotide
ctccccgaaggagtcgttac

SEQ ID NO: 9371 - DNA, 20 bp, Artificial Sequence
  Synthetic Oligonucleotide
ctccccggaggagtcgttac

SEQ ID NO: 9372 - DNA, 20 bp, Artificial Sequence
  Synthetic Oligonucleotide
gacggtgaagggtgtactct

SEQ ID NO: 9373 - DNA, 20 bp, Artificial Sequence
  Synthetic Oligonucleotide
gacggtgaaggttgtactct

SEQ ID NO: 9374 - DNA, 20 bp, Artificial Sequence
  Synthetic Oligonucleotide
gacggtgaaggttgtactct

SEQ ID NO: 9375 - DNA, 20 bp, Artificial Sequence
  Synthetic Oligonucleotide
gacggtgaaggctgtactct

SEQ ID NO: 9376 - DNA, 20 bp, Artificial Sequence
  Synthetic Oligonucleotide
gacggtgaaggctgtactct

SEQ ID NO: 9377 - DNA, 20 bp, Artificial Sequence
  Synthetic Oligonucleotide
ccctagtcggggtttgcagc

SEQ ID NO: 9378 - DNA, 20 bp, Artificial Sequence
  Synthetic Oligonucleotide
ccctagtcggggtttgcagc

SEQ ID NO: 9379 - DNA, 20 bp, Artificial Sequence
  Synthetic Oligonucleotide
ccctagtcggggtttgcagc

SEQ ID NO: 9380 - DNA, 20 bp, Artificial Sequence
  Synthetic Oligonucleotide
ccctagtcggggtttgcagc

SEQ ID NO: 9381 - DNA, 20 bp, Artificial Sequence
  Synthetic Oligonucleotide
ccctagtcggtgtttgcagc

SEQ ID NO: 9382 - DNA, 25 bp, Artificial Sequence
  Synthetic Oligonucleotide
tggcacaggactgctctgtggtgcg

SEQ ID NO: 9383 - DNA, 25 bp, Artificial Sequence
  Synthetic Oligonucleotide
gggcaacagctggtgctcgcgtcgc

SEQ ID NO: 9384 - DNA, 25 bp, Artificial Sequence
  Synthetic Oligonucleotide
agatgcgtaaagaggcgatgtgtcc

SEQ ID NO: 9385 - DNA, 25 bp, Artificial Sequence
  Synthetic Oligonucleotide
taataaggatcgtcgccataggtcc

SEQ ID NO: 9386 - DNA, 25 bp, Artificial Sequence
  Synthetic Oligonucleotide
tacaggagccgctcgacgtggtccg

SEQ ID NO: 9387 - DNA, 25 bp, Artificial Sequence
  Synthetic Oligonucleotide
tcctagagccgctgctcgttgcgcg

SEQ ID NO: 9388 - DNA, 25 bp, Artificial Sequence
  Synthetic Oligonucleotide
acttacaacatctgccggtcgcacg

SEQ ID NO: 9389 - DNA, 25 bp, Artificial Sequence
  Synthetic Oligonucleotide
acttacaacatctgccgttcgcacg

SEQ ID NO: 9390 - DNA, 25 bp, Artificial Sequence
  Synthetic Oligonucleotide
ttagttcagtcaactacgtctccgc

SEQ ID NO: 9391 - DNA, 25 bp, Artificial Sequence
  Synthetic Oligonucleotide
ttgagtgagacaactagtctgaccg

SEQ ID NO: 9392 - DNA, 25 bp, Artificial Sequence
  Synthetic Oligonucleotide
gagttgtaggagatttatcaaccgt

SEQ ID NO: 9393 - DNA, 25 bp, Artificial Sequence
  Synthetic Oligonucleotide
agttctatggagtgaacctaactcg

SEQ ID NO: 9394 - DNA, 25 bp, Artificial Sequence
  Synthetic Oligonucleotide
gtttctagtcggtgacgaccagacc

SEQ ID NO: 9395 - DNA, 25 bp, Artificial Sequence
  Synthetic Oligonucleotide
ttcgacatcggtccgagccagtcct

SEQ ID NO: 9396 - DNA, 25 bp, Artificial Sequence
  Synthetic Oligonucleotide
atcaggtccttctgtctctacgtcc

SEQ ID NO: 9397 - DNA, 25 bp, Artificial Sequence
  Synthetic Oligonucleotide
gtgtccgtcgtcattcttatcttcc

SEQ ID NO: 9398 - DNA, 25 bp, Artificial Sequence
  Synthetic Oligonucleotide
cggttctcgcgcattgtcgtcttcc

SEQ ID NO: 9399 - DNA, 25 bp, Artificial Sequence
  Synthetic Oligonucleotide
cggttcgaccggacttcgtcctgcg

SEQ ID NO: 9400 - DNA, 25 bp, Artificial Sequence
  Synthetic Oligonucleotide
ctgtcgcgggacgttacgtctccgc

SEQ ID NO: 9401 - DNA, 25 bp, Artificial Sequence
  Synthetic Oligonucleotide
ctgtctcgctaagggtacgaatcgc

SEQ ID NO: 9402 - DNA, 25 bp, Artificial Sequence
  Synthetic Oligonucleotide
gaccttctgcagatggacgtcccgc

SEQ ID NO: 9403 - DNA, 25 bp, Artificial Sequence
  Synthetic Oligonucleotide
atactcgtccagagtatcaagcccc

SEQ ID NO: 9404 - DNA, 25 bp, Artificial Sequence
  Synthetic Oligonucleotide
cgtacctcggtaattaaagcacacc

SEQ ID NO: 9405 - DNA, 25 bp, Artificial Sequence
  Synthetic Oligonucleotide
cacaaccttgttttggactacaccg

SEQ ID NO: 9406 - DNA, 25 bp, Artificial Sequence
  Synthetic Oligonucleotide
acaaccttgttaaggactacaccgc

SEQ ID NO: 9407 - DNA, 25 bp, Artificial Sequence
  Synthetic Oligonucleotide
acacacctcgttactttagtggcgc

SEQ ID NO: 9408 - DNA, 25 bp, Artificial Sequence
  Synthetic Oligonucleotide
gcgataacctcgtccttaatggcgc

SEQ ID NO: 9409 - DNA, 25 bp, Artificial Sequence
  Synthetic Oligonucleotide
gtctcatcttggctcctaatggcgc

SEQ ID NO: 9410 - DNA, 25 bp, Artificial Sequence
  Synthetic Oligonucleotide
ttcgtgcattggcccaaagcgcgag

SEQ ID NO: 9411 - DNA, 25 bp, Artificial Sequence
  Synthetic Oligonucleotide
tggtactatggatccacagaaccag

SEQ ID NO: 9412 - DNA, 25 bp, Artificial Sequence
  Synthetic Oligonucleotide
caggactatgaatcccacatagacc

SEQ ID NO: 9413 - DNA, 25 bp, Artificial Sequence
  Synthetic Oligonucleotide
aagggtatgaactgaccataaacct

SEQ ID NO: 9414 - DNA, 25 bp, Artificial Sequence
  Synthetic Oligonucleotide
acggtgttacaatacatcacaacct

SEQ ID NO: 9415 - DNA, 25 bp, Artificial Sequence
  Synthetic Oligonucleotide
aacggtgttacataacatcacaacc

SEQ ID NO: 9416 - DNA, 25 bp, Artificial Sequence
  Synthetic Oligonucleotide
gctggtactatgcaaccacagaacc

SEQ ID NO: 9417 - DNA, 25 bp, Artificial Sequence
  Synthetic Oligonucleotide
tctaggtttgctacctaccgtaccc

SEQ ID NO: 9418 - DNA, 25 bp, Artificial Sequence
  Synthetic Oligonucleotide
tagtgtttgtacgcccgtagtcgcc

SEQ ID NO: 9419 - DNA, 25 bp, Artificial Sequence
  Synthetic Oligonucleotide
catgtactgttcgacgccgagggat

SEQ ID NO: 9420 - DNA, 25 bp, Artificial Sequence
  Synthetic Oligonucleotide
catagagactggactcagtaggaat

SEQ ID NO: 9421 - DNA, 25 bp, Artificial Sequence
  Synthetic Oligonucleotide
gtagagtatcagctccaagttaagt

SEQ ID NO: 9422 - DNA, 25 bp, Artificial Sequence
  Synthetic Oligonucleotide
gtaacggtcattgcgcagtcgtgag

SEQ ID NO: 9423 - DNA, 25 bp, Artificial Sequence
  Synthetic Oligonucleotide
ccgaaaggctttaccatagtgtacg

SEQ ID NO: 9424 - DNA, 20 bp, Artificial Sequence
  Synthetic Oligonucleotide
gacttgccatcgtagaactg

SEQ ID NO: 9425 - DNA, 25 bp, Artificial Sequence
  Synthetic Oligonucleotide
aggacttgccatcgtagaactgctg

SEQ ID NO: 9426 - DNA, 25 bp, Artificial Sequence
  Synthetic Oligonucleotide
cgcgcagtgattaatctactgctcc

SEQ ID NO: 9427 - DNA, 25 bp, Artificial Sequence
  Synthetic Oligonucleotide
gaaagcaagaactaattacttttgt

SEQ ID NO: 9428 - DNA, 25 bp, Artificial Sequence
  Synthetic Oligonucleotide
gagcccggacgaaacttgtgagatt

SEQ ID NO: 9429 - DNA, 25 bp, Artificial Sequence
  Synthetic Oligonucleotide
agaacctgaacgaaatcacaagatt

SEQ ID NO: 9430 - DNA, 25 bp, Artificial Sequence
  Synthetic Oligonucleotide
aacccggtaggtaaggaccgaaatt

SEQ ID NO: 9431 - DNA, 25 bp, Artificial Sequence
  Synthetic Oligonucleotide
gtcaacgctacgtggccagaaatat

SEQ ID NO: 9432 - DNA, 25 bp, Artificial Sequence
  Synthetic Oligonucleotide
ttgttatacccgtccgcaaataagg

SEQ ID NO: 9433 - DNA, 25 bp, Artificial Sequence
  Synthetic Oligonucleotide
tttagacatccaaccggaaaaagag

SEQ ID NO: 9434 - DNA, 25 bp, Artificial Sequence
  Synthetic Oligonucleotide
agtctaccagatccggagacaagag

SEQ ID NO: 9435 - DNA, 20 bp, Artificial Sequence
  Synthetic Oligonucleotide
attaaagagagaggagttga

SEQ ID NO: 9436 - DNA, 20 bp, Artificial Sequence
  Synthetic Oligonucleotide
attaaagaaagaggagttga

SEQ ID NO: 9437 - DNA, 20 bp, Artificial Sequence
  Synthetic Oligonucleotide
attaaagagagaggagttga

SEQ ID NO: 9438 - DNA, 20 bp, Artificial Sequence
  Synthetic Oligonucleotide
attaaagacagaggagttga

SEQ ID NO: 9439 - DNA, 20 bp, Artificial Sequence
  Synthetic Oligonucleotide
attaaagagagaggagttga

SEQ ID NO: 9440 - DNA, 20 bp, Artificial Sequence
  Synthetic Oligonucleotide
attgacaacgtacggatgta

SEQ ID NO: 9441 - DNA, 20 bp, Artificial Sequence
  Synthetic Oligonucleotide
attgacaacgcacggatgta

SEQ ID NO: 9442 - DNA, 20 bp, Artificial Sequence
  Synthetic Oligonucleotide
attgacaacgcacggatgta

SEQ ID NO: 9443 - DNA, 20 bp, Artificial Sequence
  Synthetic Oligonucleotide
attgacaacggacggatgta

SEQ ID NO: 9444 - DNA, 20 bp, Artificial Sequence
  Synthetic Oligonucleotide
attgacaacgtacggatgta

SEQ ID NO: 9445 - DNA, 20 bp, Artificial Sequence
  Synthetic Oligonucleotide
taaaggagagcagaagacct

SEQ ID NO: 9446 - DNA, 20 bp, Artificial Sequence
  Synthetic Oligonucleotide
taaaggagaccagaagacct

SEQ ID NO: 9447 - DNA, 20 bp, Artificial Sequence
  Synthetic Oligonucleotide
taaaggagaccagaagacct

SEQ ID NO: 9448 - DNA, 20 bp, Artificial Sequence
  Synthetic Oligonucleotide
taaaggagagcagaagacct

SEQ ID NO: 9449 - DNA, 20 bp, Artificial Sequence
  Synthetic Oligonucleotide
taaaggagaacagaagacct

SEQ ID NO: 9450 - DNA, 20 bp, Artificial Sequence
  Synthetic Oligonucleotide
ttcataagtcacaggacggt

SEQ ID NO: 9451 - DNA, 20 bp, Artificial Sequence
  Synthetic Oligonucleotide
ttcataagacacaggacggt

SEQ ID NO: 9452 - DNA, 20 bp, Artificial Sequence
  Synthetic Oligonucleotide
ttcataagtcacaggacggt

SEQ ID NO: 9453 - DNA, 20 bp, Artificial Sequence
  Synthetic Oligonucleotide
ttcataagccacaggacggt

SEQ ID NO: 9454 - DNA, 20 bp, Artificial Sequence
  Synthetic Oligonucleotide
ttcataaggcacaggacggt

SEQ ID NO: 9455 - DNA, 20 bp, Artificial Sequence
  Synthetic Oligonucleotide
gaccacgtagggatatgtcg

SEQ ID NO: 9456 - DNA, 20 bp, Artificial Sequence
  Synthetic Oligonucleotide
gaccacgtagggatatgtcg

SEQ ID NO: 9457 - DNA, 20 bp, Artificial Sequence
  Synthetic Oligonucleotide
gaccacgtagggatatgtcg

SEQ ID NO: 9458 - DNA, 20 bp, Artificial Sequence
  Synthetic Oligonucleotide
gaccacgcagggatatgtcg

SEQ ID NO: 9459 - DNA, 20 bp, Artificial Sequence
  Synthetic Oligonucleotide
gaccacgcagggatatgtcg

SEQ ID NO: 9460 - DNA, 20 bp, Artificial Sequence
  Synthetic Oligonucleotide
cacctgtaaggcgtgacacc

SEQ ID NO: 9461 - DNA, 20 bp, Artificial Sequence
  Synthetic Oligonucleotide
cacctgtaaggtgtgacacc

SEQ ID NO: 9462 - DNA, 20 bp, Artificial Sequence
  Synthetic Oligonucleotide
cacctgtaaggtgtgacacc

SEQ ID NO: 9463 - DNA, 20 bp, Artificial Sequence
  Synthetic Oligonucleotide
cacctgtaaggcgtgacacc

SEQ ID NO: 9464 - DNA, 20 bp, Artificial Sequence
  Synthetic Oligonucleotide
cacctgtaaggcgtgacacc

SEQ ID NO: 9465 - DNA, 20 bp, Artificial Sequence
  Synthetic Oligonucleotide
tcgagacgggtgtaagtctg

SEQ ID NO: 9466 - DNA, 20 bp, Artificial Sequence
  Synthetic Oligonucleotide
tcgagacgggcgtaagtctg

SEQ ID NO: 9467 - DNA, 20 bp, Artificial Sequence
  Synthetic Oligonucleotide
tcgagacgggtgtaagtctg

SEQ ID NO: 9468 - DNA, 20 bp, Artificial Sequence
  Synthetic Oligonucleotide
tcgagacgggtgtaagtctg

SEQ ID NO: 9469 - DNA, 20 bp, Artificial Sequence
  Synthetic Oligonucleotide
tcgagacgggtgtaagtctg

SEQ ID NO: 9470 - DNA, 20 bp, Artificial Sequence
  Synthetic Oligonucleotide
gacacaggaaggtctaccag

SEQ ID NO: 9471 - DNA, 20 bp, Artificial Sequence
  Synthetic Oligonucleotide
gacacaggaaggtctaccag

SEQ ID NO: 9472 - DNA, 20 bp, Artificial Sequence
  Synthetic Oligonucleotide
gacacagggaggtctaccag

SEQ ID NO: 9473 - DNA, 20 bp, Artificial Sequence
  Synthetic Oligonucleotide
gacacaggcaggtctaccag

SEQ ID NO: 9474 - DNA, 20 bp, Artificial Sequence
  Synthetic Oligonucleotide
gacacaggaaggtctaccag

SEQ ID NO: 9475 - DNA, 20 bp, Artificial Sequence
  Synthetic Oligonucleotide
gttcggaaggaatctttagt

SEQ ID NO: 9476 - DNA, 20 bp, Artificial Sequence
  Synthetic Oligonucleotide
gttcggaaggcatctttagt

SEQ ID NO: 9477 - DNA, 20 bp, Artificial Sequence
  Synthetic Oligonucleotide
gttcggaagggatctttagt

SEQ ID NO: 9478 - DNA, 20 bp, Artificial Sequence
  Synthetic Oligonucleotide
gttcggaagggatctttagt

SEQ ID NO: 9479 - DNA, 20 bp, Artificial Sequence
  Synthetic Oligonucleotide
gttcggaaggaatctttagt

SEQ ID NO: 9480 - DNA, 20 bp, Artificial Sequence
  Synthetic Oligonucleotide
ctccccgtaggagtcgttac

SEQ ID NO: 9481 - DNA, 20 bp, Artificial Sequence
  Synthetic Oligonucleotide
ctccccgcaggagtcgttac

SEQ ID NO: 9482 - DNA, 20 bp, Artificial Sequence
  Synthetic Oligonucleotide
ctccccgcaggagtcgttac

SEQ ID NO: 9483 - DNA, 20 bp, Artificial Sequence
  Synthetic Oligonucleotide
ctccccgtaggagtcgttac

SEQ ID NO: 9484 - DNA, 20 bp, Artificial Sequence
  Synthetic Oligonucleotide
ctccccgcaggagtcgttac

SEQ ID NO: 9485 - DNA, 20 bp, Artificial Sequence
  Synthetic Oligonucleotide
gacggtgaaggctgtactct

SEQ ID NO: 9486 - DNA, 20 bp, Artificial Sequence
  Synthetic Oligonucleotide
gacggtgaagggtgtactct

SEQ ID NO: 9487 - DNA, 20 bp, Artificial Sequence
  Synthetic Oligonucleotide
gacggtgaagggtgtactct

SEQ ID NO: 9488 - DNA, 20 bp, Artificial Sequence
  Synthetic Oligonucleotide
gacggtgaaggatgtactct

SEQ ID NO: 9489 - DNA, 20 bp, Artificial Sequence
  Synthetic Oligonucleotide
gacggtgaaggatgtactct

SEQ ID NO: 9490 - DNA, 20 bp, Artificial Sequence
  Synthetic Oligonucleotide
ccctagtcggcgtttgcagc

SEQ ID NO: 9491 - DNA, 20 bp, Artificial Sequence
  Synthetic Oligonucleotide
ccctagtcggcgtttgcagc

SEQ ID NO: 9492 - DNA, 20 bp, Artificial Sequence
  Synthetic Oligonucleotide
ccctagtcggcgtttgcagc

SEQ ID NO: 9493 - DNA, 20 bp, Artificial Sequence
  Synthetic Oligonucleotide
ccctagtcggcgtttgcagc

SEQ ID NO: 9494 - DNA, 20 bp, Artificial Sequence
  Synthetic Oligonucleotide
ccctagtcggggtttgcagc

SEQ ID NO: 9495 - DNA, 25 bp, Artificial Sequence
  Synthetic Oligonucleotide
cccctacgagcgaggttggctgacg

SEQ ID NO: 9496 - DNA, 25 bp, Artificial Sequence
  Synthetic Oligonucleotide
acgacaacgcgacattgcggtcgcg

SEQ ID NO: 9497 - DNA, 25 bp, Artificial Sequence
  Synthetic Oligonucleotide
gaagacctacaacatcagtcgttcc

SEQ ID NO: 9498 - DNA, 25 bp, Artificial Sequence
  Synthetic Oligonucleotide
acgtaaagaacaagcttcaggttcc

SEQ ID NO: 9499 - DNA, 25 bp, Artificial Sequence
  Synthetic Oligonucleotide
cggtaaagcaagagtttcaggttcc

SEQ ID NO: 9500 - DNA, 25 bp, Artificial Sequence
  Synthetic Oligonucleotide
aggaccaagcggttctcggtgttcc

SEQ ID NO: 9501 - DNA, 25 bp, Artificial Sequence
  Synthetic Oligonucleotide
ctactacaagacccgtcggggtgcc

SEQ ID NO: 9502 - DNA, 25 bp, Artificial Sequence
  Synthetic Oligonucleotide
actacagtaggtctgtgggtaacag

SEQ ID NO: 9503 - DNA, 25 bp, Artificial Sequence
  Synthetic Oligonucleotide
cctggtctggtctgttggtatcgag

SEQ ID NO: 9504 - DNA, 25 bp, Artificial Sequence
  Synthetic Oligonucleotide
gaggtggttgattcttgccggtacg

SEQ ID NO: 9505 - DNA, 25 bp, Artificial Sequence
  Synthetic Oligonucleotide
taatggaggaggtttcattccgaag

SEQ ID NO: 9506 - DNA, 25 bp, Artificial Sequence
  Synthetic Oligonucleotide
aagtgagcggcaatgattccgttag

SEQ ID NO: 9507 - DNA, 25 bp, Artificial Sequence
  Synthetic Oligonucleotide
atttgcaaatattagttcacgcggt

SEQ ID NO: 9508 - DNA, 25 bp, Artificial Sequence
  Synthetic Oligonucleotide
ttgcagcgatacttgcgaaccgacg

SEQ ID NO: 9509 - DNA, 25 bp, Artificial Sequence
  Synthetic Oligonucleotide
gtaccgagtctaacttgcgaccgcc

SEQ ID NO: 9510 - DNA, 25 bp, Artificial Sequence
  Synthetic Oligonucleotide
aactaccatgtactgttccacgccg

SEQ ID NO: 9511 - DNA, 25 bp, Artificial Sequence
  Synthetic Oligonucleotide
gtaactattggaaccgttcccctcg

SEQ ID NO: 9512 - DNA, 25 bp, Artificial Sequence
  Synthetic Oligonucleotide
tagatatgtgaggccttaccacgcc

SEQ ID NO: 9513 - DNA, 25 bp, Artificial Sequence
  Synthetic Oligonucleotide
acggagtcggagggctcatcgaccc

SEQ ID NO: 9514 - DNA, 25 bp, Artificial Sequence
  Synthetic Oligonucleotide
ccatcaagtggctgacgacgagcgc

SEQ ID NO: 9515 - DNA, 25 bp, Artificial Sequence
  Synthetic Oligonucleotide
cccctagagagggtcgtcgccgcgc

SEQ ID NO: 9516 - DNA, 25 bp, Artificial Sequence
  Synthetic Oligonucleotide
ctttcctcaaatctacgttgcggct

SEQ ID NO: 9517 - DNA, 25 bp, Artificial Sequence
  Synthetic Oligonucleotide
tccgtcggaagtcgagtagagccgc

SEQ ID NO: 9518 - DNA, 25 bp, Artificial Sequence
  Synthetic Oligonucleotide
ctcgtcgtgtcccacgaggagtccc

SEQ ID NO: 9519 - DNA, 25 bp, Artificial Sequence
  Synthetic Oligonucleotide
ccactgctacggcacgagctacccc

SEQ ID NO: 9520 - DNA, 25 bp, Artificial Sequence
  Synthetic Oligonucleotide
tcagtgttacgactagtgtttaccc

SEQ ID NO: 9521 - DNA, 25 bp, Artificial Sequence
  Synthetic Oligonucleotide
taagggtacgtctacgtgttattcc

SEQ ID NO: 9522 - DNA, 25 bp, Artificial Sequence
  Synthetic Oligonucleotide
aatagggtacgtgtcttataagtcc

SEQ ID NO: 9523 - DNA, 25 bp, Artificial Sequence
  Synthetic Oligonucleotide
gagcatgactcgtcctaatggtacc

SEQ ID NO: 9524 - DNA, 25 bp, Artificial Sequence
  Synthetic Oligonucleotide
ggtgatggtccgtctaaggatccgt

SEQ ID NO: 9525 - DNA, 25 bp, Artificial Sequence
  Synthetic Oligonucleotide
tgggtatggctggtactatggaacc

SEQ ID NO: 9526 - DNA, 25 bp, Artificial Sequence
  Synthetic Oligonucleotide
tagtggttgcatcctcagaaaaact

SEQ ID NO: 9527 - DNA, 25 bp, Artificial Sequence
  Synthetic Oligonucleotide
agaggctgcatgctcaggaagacag

SEQ ID NO: 9528 - DNA, 25 bp, Artificial Sequence
  Synthetic Oligonucleotide
agcgggtgcatcctcaggaagaccg

SEQ ID NO: 9529 - DNA, 25 bp, Artificial Sequence
  Synthetic Oligonucleotide
agcgggtgcatccttagaaagactg

SEQ ID NO: 9530 - DNA, 25 bp, Artificial Sequence
  Synthetic Oligonucleotide
agcgggtgcatccttagaaagacgg

SEQ ID NO: 9531 - DNA, 25 bp, Artificial Sequence
  Synthetic Oligonucleotide
aagaggtgacttcttgacgagaacc

SEQ ID NO: 9532 - DNA, 25 bp, Artificial Sequence
  Synthetic Oligonucleotide
aggtgtgtctcatgaacgcgagtcc

SEQ ID NO: 9533 - DNA, 25 bp, Artificial Sequence
  Synthetic Oligonucleotide
tgcgtagctccaacaacgcgaccgg

SEQ ID NO: 9534 - DNA, 25 bp, Artificial Sequence
  Synthetic Oligonucleotide
gacgtaggacagtcgctacggaccc

SEQ ID NO: 9535 - DNA, 25 bp, Artificial Sequence
  Synthetic Oligonucleotide
gaagtaacgcgtgctaacggcggcg

SEQ ID NO: 9536 - DNA, 25 bp, Artificial Sequence
  Synthetic Oligonucleotide
aagtatgacagtgtaacaacgttcg

SEQ ID NO: 9537 - DNA, 25 bp, Artificial Sequence
  Synthetic Oligonucleotide
aggacttgccatcgtagaactgctg

SEQ ID NO: 9538 - DNA, 20 bp, Artificial Sequence
  Synthetic Oligonucleotide
cagttctacgatggcaagtc

SEQ ID NO: 9539 - DNA, 25 bp, Artificial Sequence
  Synthetic Oligonucleotide
cgcgcagtgatttatctactgctcc

SEQ ID NO: 9540 - DNA, 25 bp, Artificial Sequence
  Synthetic Oligonucleotide
gaaagcaagaacaaattacttttgt

SEQ ID NO: 9541 - DNA, 25 bp, Artificial Sequence
  Synthetic Oligonucleotide
gagcccggacgatacttgtgagatt

SEQ ID NO: 9542 - DNA, 25 bp, Artificial Sequence
  Synthetic Oligonucleotide
agaacctgaacgtaatcacaagatt

SEQ ID NO: 9543 - DNA, 25 bp, Artificial Sequence
  Synthetic Oligonucleotide
aacccggtaggttaggaccgaaatt

SEQ ID NO: 9544 - DNA, 25 bp, Artificial Sequence
  Synthetic Oligonucleotide
gtcaacgctacgaggccagaaatat

SEQ ID NO: 9545 - DNA, 25 bp, Artificial Sequence
  Synthetic Oligonucleotide
ttgttatacccgaccgcaaataagg

SEQ ID NO: 9546 - DNA, 25 bp, Artificial Sequence
  Synthetic Oligonucleotide
tttagacatccatccggaaaaagag

SEQ ID NO: 9547 - DNA, 25 bp, Artificial Sequence
  Synthetic Oligonucleotide
agtctaccagatgcggagacaagag

SEQ ID NO: 9548 - DNA, 20 bp, Artificial Sequence
  Synthetic Oligonucleotide
attaaagacagaggagttga

SEQ ID NO: 9549 - DNA, 20 bp, Artificial Sequence
  Synthetic Oligonucleotide
attaaagatagaggagttga

SEQ ID NO: 9550 - DNA, 20 bp, Artificial Sequence
  Synthetic Oligonucleotide
attaaagacagaggagttga

SEQ ID NO: 9551 - DNA, 20 bp, Artificial Sequence
  Synthetic Oligonucleotide
attaaagaaagaggagttga

SEQ ID NO: 9552 - DNA, 20 bp, Artificial Sequence
  Synthetic Oligonucleotide
attaaagacagaggagttga

SEQ ID NO: 9553 - DNA, 20 bp, Artificial Sequence
  Synthetic Oligonucleotide
attgacaacggacggatgta

SEQ ID NO: 9554 - DNA, 20 bp, Artificial Sequence
  Synthetic Oligonucleotide
attgacaacgaacggatgta

SEQ ID NO: 9555 - DNA, 20 bp, Artificial Sequence
  Synthetic Oligonucleotide
attgacaacgaacggatgta

SEQ ID NO: 9556 - DNA, 20 bp, Artificial Sequence
  Synthetic Oligonucleotide
attgacaacgcacggatgta

SEQ ID NO: 9557 - DNA, 20 bp, Artificial Sequence
  Synthetic Oligonucleotide
attgacaacggacggatgta

SEQ ID NO: 9558 - DNA, 20 bp, Artificial Sequence
  Synthetic Oligonucleotide
taaaggagaccagaagacct

SEQ ID NO: 9559 - DNA, 20 bp, Artificial Sequence
  Synthetic Oligonucleotide
taaaggagaacagaagacct

SEQ ID NO: 9560 - DNA, 20 bp, Artificial Sequence
  Synthetic Oligonucleotide
taaaggagaacagaagacct

SEQ ID NO: 9561 - DNA, 20 bp, Artificial Sequence
  Synthetic Oligonucleotide
taaaggagaccagaagacct

SEQ ID NO: 9562 - DNA, 20 bp, Artificial Sequence
  Synthetic Oligonucleotide
taaaggagatcagaagacct

SEQ ID NO: 9563 - DNA, 20 bp, Artificial Sequence
  Synthetic Oligonucleotide
ttcataaggcacaggacggt

SEQ ID NO: 9564 - DNA, 20 bp, Artificial Sequence
  Synthetic Oligonucleotide
ttcataagtcacaggacggt

SEQ ID NO: 9565 - DNA, 20 bp, Artificial Sequence
  Synthetic Oligonucleotide
ttcataaggcacaggacggt

SEQ ID NO: 9566 - DNA, 20 bp, Artificial Sequence
  Synthetic Oligonucleotide
ttcataagacacaggacggt

SEQ ID NO: 9567 - DNA, 20 bp, Artificial Sequence
  Synthetic Oligonucleotide
ttcataagccacaggacggt

SEQ ID NO: 9568 - DNA, 20 bp, Artificial Sequence
  Synthetic Oligonucleotide
gaccacggagggatatgtcg

SEQ ID NO: 9569 - DNA, 20 bp, Artificial Sequence
  Synthetic Oligonucleotide
gaccacggagggatatgtcg

SEQ ID NO: 9570 - DNA, 20 bp, Artificial Sequence
  Synthetic Oligonucleotide
gaccacggagggatatgtcg

SEQ ID NO: 9571 - DNA, 20 bp, Artificial Sequence
  Synthetic Oligonucleotide
gaccacgaagggatatgtcg

SEQ ID NO: 9572 - DNA, 20 bp, Artificial Sequence
  Synthetic Oligonucleotide
gaccacgaagggatatgtcg

SEQ ID NO: 9573 - DNA, 20 bp, Artificial Sequence
  Synthetic Oligonucleotide
cacctgtaaggagtgacacc

SEQ ID NO: 9574 - DNA, 20 bp, Artificial Sequence
  Synthetic Oligonucleotide
cacctgtaaggggtgacacc

SEQ ID NO: 9575 - DNA, 20 bp, Artificial Sequence
  Synthetic Oligonucleotide
cacctgtaaggggtgacacc

SEQ ID NO: 9576 - DNA, 20 bp, Artificial Sequence
  Synthetic Oligonucleotide
cacctgtaaggagtgacacc

SEQ ID NO: 9577 - DNA, 20 bp, Artificial Sequence
  Synthetic Oligonucleotide
cacctgtaaggagtgacacc

SEQ ID NO: 9578 - DNA, 20 bp, Artificial Sequence
  Synthetic Oligonucleotide
tcgagacgggggtaagtctg

SEQ ID NO: 9579 - DNA, 20 bp, Artificial Sequence
  Synthetic Oligonucleotide
tcgagacgggagtaagtctg

SEQ ID NO: 9580 - DNA, 20 bp, Artificial Sequence
  Synthetic Oligonucleotide
tcgagacgggggtaagtctg

SEQ ID NO: 9581 - DNA, 20 bp, Artificial Sequence
  Synthetic Oligonucleotide
tcgagacgggggtaagtctg

SEQ ID NO: 9582 - DNA, 20 bp, Artificial Sequence
  Synthetic Oligonucleotide
tcgagacgggggtaagtctg

SEQ ID NO: 9583 - DNA, 20 bp, Artificial Sequence
  Synthetic Oligonucleotide
gacacaggtaggtctaccag

SEQ ID NO: 9584 - DNA, 20 bp, Artificial Sequence
  Synthetic Oligonucleotide
gacacaggtaggtctaccag

SEQ ID NO: 9585 - DNA, 20 bp, Artificial Sequence
  Synthetic Oligonucleotide
gacacaggcaggtctaccag

SEQ ID NO: 9586 - DNA, 20 bp, Artificial Sequence
  Synthetic Oligonucleotide
gacacaggaaggtctaccag

SEQ ID NO: 9587 - DNA, 20 bp, Artificial Sequence
  Synthetic Oligonucleotide
gacacaggtaggtctaccag

SEQ ID NO: 9588 - DNA, 20 bp, Artificial Sequence
  Synthetic Oligonucleotide
gttcggaaggtatctttagt

SEQ ID NO: 9589 - DNA, 20 bp, Artificial Sequence
  Synthetic Oligonucleotide
gttcggaaggaatctttagt

SEQ ID NO: 9590 - DNA, 20 bp, Artificial Sequence
  Synthetic Oligonucleotide
gttcggaaggcatctttagt

SEQ ID NO: 9591 - DNA, 20 bp, Artificial Sequence
  Synthetic Oligonucleotide
gttcggaaggcatctttagt

SEQ ID NO: 9592 - DNA, 20 bp, Artificial Sequence
  Synthetic Oligonucleotide
gttcggaaggtatctttagt

SEQ ID NO: 9593 - DNA, 20 bp, Artificial Sequence
  Synthetic Oligonucleotide
ctccccggaggagtcgttac

SEQ ID NO: 9594 - DNA, 20 bp, Artificial Sequence
  Synthetic Oligonucleotide
ctccccgaaggagtcgttac

SEQ ID NO: 9595 - DNA, 20 bp, Artificial Sequence
  Synthetic Oligonucleotide
ctccccgaaggagtcgttac

SEQ ID NO: 9596 - DNA, 20 bp, Artificial Sequence
  Synthetic Oligonucleotide
ctccccggaggagtcgttac

SEQ ID NO: 9597 - DNA, 20 bp, Artificial Sequence
  Synthetic Oligonucleotide
ctccccgaaggagtcgttac

SEQ ID NO: 9598 - DNA, 20 bp, Artificial Sequence
  Synthetic Oligonucleotide
gacggtgaaggatgtactct

SEQ ID NO: 9599 - DNA, 20 bp, Artificial Sequence
  Synthetic Oligonucleotide
gacggtgaaggctgtactct

SEQ ID NO: 9600 - DNA, 20 bp, Artificial Sequence
  Synthetic Oligonucleotide
gacggtgaaggctgtactct

SEQ ID NO: 9601 - DNA, 20 bp, Artificial Sequence
  Synthetic Oligonucleotide
gacggtgaaggttgtactct

SEQ ID NO: 9602 - DNA, 20 bp, Artificial Sequence
  Synthetic Oligonucleotide
gacggtgaaggttgtactct

SEQ ID NO: 9603 - DNA, 20 bp, Artificial Sequence
  Synthetic Oligonucleotide
ccctagtcggagtttgcagc

SEQ ID NO: 9604 - DNA, 20 bp, Artificial Sequence
  Synthetic Oligonucleotide
ccctagtcggagtttgcagc

SEQ ID NO: 9605 - DNA, 20 bp, Artificial Sequence
  Synthetic Oligonucleotide
ccctagtcggagtttgcagc

SEQ ID NO: 9606 - DNA, 20 bp, Artificial Sequence
  Synthetic Oligonucleotide
ccctagtcggagtttgcagc

SEQ ID NO: 9607 - DNA, 20 bp, Artificial Sequence
  Synthetic Oligonucleotide
ccctagtcggcgtttgcagc

SEQ ID NO: 9608 - DNA, 25 bp, Artificial Sequence
  Synthetic Oligonucleotide
cccctacgagcgtggttggctgacg

SEQ ID NO: 9609 - DNA, 25 bp, Artificial Sequence
  Synthetic Oligonucleotide
acgacaacgcgagattgcggtcgcg

SEQ ID NO: 9610 - DNA, 25 bp, Artificial Sequence
  Synthetic Oligonucleotide
gaagacctacaagatcagtcgttcc

SEQ ID NO: 9611 - DNA, 25 bp, Artificial Sequence
  Synthetic Oligonucleotide
acgtaaagaacatgcttcaggttcc

SEQ ID NO: 9612 - DNA, 25 bp, Artificial Sequence
  Synthetic Oligonucleotide
cggtaaagcaagtgtttcaggttcc

SEQ ID NO: 9613 - DNA, 25 bp, Artificial Sequence
  Synthetic Oligonucleotide
aggaccaagcggatctcggtgttcc

SEQ ID NO: 9614 - DNA, 25 bp, Artificial Sequence
  Synthetic Oligonucleotide
ctactacaagacgcgtcggggtgcc

SEQ ID NO: 9615 - DNA, 25 bp, Artificial Sequence
  Synthetic Oligonucleotide
actacagtaggtgtgtgggtaacag

SEQ ID NO: 9616 - DNA, 25 bp, Artificial Sequence
  Synthetic Oligonucleotide
cctggtctggtcagttggtatcgag

SEQ ID NO: 9617 - DNA, 25 bp, Artificial Sequence
  Synthetic Oligonucleotide
gaggtggttgatacttgccggtacg

SEQ ID NO: 9618 - DNA, 25 bp, Artificial Sequence
  Synthetic Oligonucleotide
taatggaggaggattcattccgaag

SEQ ID NO: 9619 - DNA, 25 bp, Artificial Sequence
  Synthetic Oligonucleotide
aagtgagcggcattgattccgttag

SEQ ID NO: 9620 - DNA, 25 bp, Artificial Sequence
  Synthetic Oligonucleotide
atttgcaaatataagttcacgcggt

SEQ ID NO: 9621 - DNA, 25 bp, Artificial Sequence
  Synthetic Oligonucleotide
ttgcagcgatacatgcgaaccgacg

SEQ ID NO: 9622 - DNA, 25 bp, Artificial Sequence
  Synthetic Oligonucleotide
gtaccgagtctatcttgcgaccgcc

SEQ ID NO: 9623 - DNA, 25 bp, Artificial Sequence
  Synthetic Oligonucleotide
aactaccatgtagtgttccacgccg

SEQ ID NO: 9624 - DNA, 25 bp, Artificial Sequence
  Synthetic Oligonucleotide
gtaactattggatccgttcccctcg

SEQ ID NO: 9625 - DNA, 25 bp, Artificial Sequence
  Synthetic Oligonucleotide
tagatatgtgagcccttaccacgcc

SEQ ID NO: 9626 - DNA, 25 bp, Artificial Sequence
  Synthetic Oligonucleotide
acggagtcggagcgctcatcgaccc

SEQ ID NO: 9627 - DNA, 25 bp, Artificial Sequence
  Synthetic Oligonucleotide
ccatcaagtggcagacgacgagcgc

SEQ ID NO: 9628 - DNA, 25 bp, Artificial Sequence
  Synthetic Oligonucleotide
cccctagagaggctcgtcgccgcgc

SEQ ID NO: 9629 - DNA, 25 bp, Artificial Sequence
  Synthetic Oligonucleotide
ctttcctcaaatgtacgttgcggct

SEQ ID NO: 9630 - DNA, 25 bp, Artificial Sequence
  Synthetic Oligonucleotide
tccgtcggaagtggagtagagccgc

SEQ ID NO: 9631 - DNA, 25 bp, Artificial Sequence
  Synthetic Oligonucleotide
ctcgtcgtgtccgacgaggagtccc

SEQ ID NO: 9632 - DNA, 25 bp, Artificial Sequence
  Synthetic Oligonucleotide
ccactgctacgggacgagctacccc

SEQ ID NO: 9633 - DNA, 25 bp, Artificial Sequence
  Synthetic Oligonucleotide
tcagtgttacgagtagtgtttaccc

SEQ ID NO: 9634 - DNA, 25 bp, Artificial Sequence
  Synthetic Oligonucleotide
taagggtacgtcaacgtgttattcc

SEQ ID NO: 9635 - DNA, 25 bp, Artificial Sequence
  Synthetic Oligonucleotide
aatagggtacgtctcttataagtcc

SEQ ID NO: 9636 - DNA, 25 bp, Artificial Sequence
  Synthetic Oligonucleotide
gagcatgactcgacctaatggtacc

SEQ ID NO: 9637 - DNA, 25 bp, Artificial Sequence
  Synthetic Oligonucleotide
ggtgatggtccgactaaggatccgt

SEQ ID NO: 9638 - DNA, 25 bp, Artificial Sequence
  Synthetic Oligonucleotide
tgggtatggctgctactatggaacc

SEQ ID NO: 9639 - DNA, 25 bp, Artificial Sequence
  Synthetic Oligonucleotide
tagtggttgcatgctcagaaaaact

SEQ ID NO: 9640 - DNA, 25 bp, Artificial Sequence
  Synthetic Oligonucleotide
agaggctgcatggtcaggaagacag

SEQ ID NO: 9641 - DNA, 25 bp, Artificial Sequence
  Synthetic Oligonucleotide
agcgggtgcatcgtcaggaagaccg

SEQ ID NO: 9642 - DNA, 25 bp, Artificial Sequence
  Synthetic Oligonucleotide
agcgggtgcatcgttagaaagactg

SEQ ID NO: 9643 - DNA, 25 bp, Artificial Sequence
  Synthetic Oligonucleotide
agcgggtgcatcgttagaaagacgg

SEQ ID NO: 9644 - DNA, 25 bp, Artificial Sequence
  Synthetic Oligonucleotide
aagaggtgacttgttgacgagaacc

SEQ ID NO: 9645 - DNA, 25 bp, Artificial Sequence
  Synthetic Oligonucleotide
aggtgtgtctcaagaacgcgagtcc

SEQ ID NO: 9646 - DNA, 25 bp, Artificial Sequence
  Synthetic Oligonucleotide
tgcgtagctccatcaacgcgaccgg

SEQ ID NO: 9647 - DNA, 25 bp, Artificial Sequence
  Synthetic Oligonucleotide
gacgtaggacagacgctacggaccc

SEQ ID NO: 9648 - DNA, 25 bp, Artificial Sequence
  Synthetic Oligonucleotide
gaagtaacgcgtcctaacggcggcg

SEQ ID NO: 9649 - DNA, 25 bp, Artificial Sequence
  Synthetic Oligonucleotide
aagtatgacagtctaacaacgttcg

SEQ ID NO: 9650 - DNA, 20 bp, Artificial Sequence
  Synthetic Oligonucleotide
cagttctacgatggcaagtc

SEQ ID NO: 9651 - DNA, 18 bp, Artificial Sequence
  Synthetic Oligonucleotide
agttctacgatggcaagt

SEQ ID NO: 9652 - DNA, 25 bp, Artificial Sequence
  Synthetic Oligonucleotide
accgttgttgtgtagtagtcatccc

SEQ ID NO: 9653 - DNA, 25 bp, Artificial Sequence
  Synthetic Oligonucleotide
aaaccttgtcagaaaggtttctctg

SEQ ID NO: 9654 - DNA, 25 bp, Artificial Sequence
  Synthetic Oligonucleotide
ctattacctgtgagatcggtttttt

SEQ ID NO: 9655 - DNA, 25 bp, Artificial Sequence
  Synthetic Oligonucleotide
cagtcagtttagagatggccggttt

SEQ ID NO: 9656 - DNA, 25 bp, Artificial Sequence
  Synthetic Oligonucleotide
caacgatcgtaaaagggttccattt

SEQ ID NO: 9657 - DNA, 25 bp, Artificial Sequence
  Synthetic Oligonucleotide
gcccgatagaagtggggaccctcct

SEQ ID NO: 9658 - DNA, 25 bp, Artificial Sequence
  Synthetic Oligonucleotide
cccggtgcacgtagggaaacctctt

SEQ ID NO: 9659 - DNA, 25 bp, Artificial Sequence
  Synthetic Oligonucleotide
gcgttcgacgtttaggaaatcactg

SEQ ID NO: 9660 - DNA, 25 bp, Artificial Sequence
  Synthetic Oligonucleotide
cgtcgtagagtcctggttaaataag

SEQ ID NO: 9661 - DNA, 25 bp, Artificial Sequence
  Synthetic Oligonucleotide
cgaactaaagactttacagctggcg

SEQ ID NO: 9662 - DNA, 25 bp, Artificial Sequence
  Synthetic Oligonucleotide
aaaacttcagacacttaaatcgtcg

SEQ ID NO: 9663 - DNA, 25 bp, Artificial Sequence
  Synthetic Oligonucleotide
agtaccatcggcacgttagcttccg

SEQ ID NO: 9664 - DNA, 25 bp, Artificial Sequence
  Synthetic Oligonucleotide
cgtaaccgccgctctctagattccg

SEQ ID NO: 9665 - DNA, 25 bp, Artificial Sequence
  Synthetic Oligonucleotide
aactcccacggttttcagagtatcc

SEQ ID NO: 9666 - DNA, 25 bp, Artificial Sequence
  Synthetic Oligonucleotide
actcccacggttttcagagtatccg

SEQ ID NO: 9667 - DNA, 25 bp, Artificial Sequence
  Synthetic Oligonucleotide
ccaacatgtccaccgtgtactagcg

SEQ ID NO: 9668 - DNA, 25 bp, Artificial Sequence
  Synthetic Oligonucleotide
ccaataagttgaacgtggtacggcg

SEQ ID NO: 9669 - DNA, 25 bp, Artificial Sequence
  Synthetic Oligonucleotide
cttcctaaatttcacctgagtaagg

SEQ ID NO: 9670 - DNA, 25 bp, Artificial Sequence
  Synthetic Oligonucleotide
tcctagtgagtttcattcgctggtg

SEQ ID NO: 9671 - DNA, 25 bp, Artificial Sequence
  Synthetic Oligonucleotide
agtctagtgagaaaccgttgctggg

SEQ ID NO: 9672 - DNA, 25 bp, Artificial Sequence
  Synthetic Oligonucleotide
atcgatgaagacctcgttgggtgag

SEQ ID NO: 9673 - DNA, 25 bp, Artificial Sequence
  Synthetic Oligonucleotide
gtcgaacgcttctcgtcgtcgtagg

SEQ ID NO: 9674 - DNA, 25 bp, Artificial Sequence
  Synthetic Oligonucleotide
gggtcaaccactgctacggcacgag

SEQ ID NO: 9675 - DNA, 25 bp, Artificial Sequence
  Synthetic Oligonucleotide
aatgcggcaaccgtacgcgccgtag

SEQ ID NO: 9676 - DNA, 25 bp, Artificial Sequence
  Synthetic Oligonucleotide
aaagtggtacaaccggtccgaccag

SEQ ID NO: 9677 - DNA, 25 bp, Artificial Sequence
  Synthetic Oligonucleotide
agtggtgcgcgacctagacgcaccg

SEQ ID NO: 9678 - DNA, 25 bp, Artificial Sequence
  Synthetic Oligonucleotide
tcgtcgccgcgcccttagtacgccc

SEQ ID NO: 9679 - DNA, 25 bp, Artificial Sequence
  Synthetic Oligonucleotide
aagtacgccgacgcgccagtcgccc

SEQ ID NO: 9680 - DNA, 25 bp, Artificial Sequence
  Synthetic Oligonucleotide
aatgtaccacttcgccagcgacgcc

SEQ ID NO: 9681 - DNA, 25 bp, Artificial Sequence
  Synthetic Oligonucleotide
atcgacgccataggtccgccgagcc

SEQ ID NO: 9682 - DNA, 25 bp, Artificial Sequence
  Synthetic Oligonucleotide
ctcgaccttaatggcgccgacgacc

SEQ ID NO: 9683 - DNA, 25 bp, Artificial Sequence
  Synthetic Oligonucleotide
cccatcgaatagttgtccgacgacc

SEQ ID NO: 9684 - DNA, 25 bp, Artificial Sequence
  Synthetic Oligonucleotide
ccactcgaactggacgtacgcggcc

SEQ ID NO: 9685 - DNA, 25 bp, Artificial Sequence
  Synthetic Oligonucleotide
cgactcgggtagcacgtgtaccacc

SEQ ID NO: 9686 - DNA, 25 bp, Artificial Sequence
  Synthetic Oligonucleotide
cgagtcgagtcggtcacgtcagccc

SEQ ID NO: 9687 - DNA, 25 bp, Artificial Sequence
  Synthetic Oligonucleotide
cctgtgagtcgattctcgtagctcc

SEQ ID NO: 9688 - DNA, 25 bp, Artificial Sequence
  Synthetic Oligonucleotide
tagtctatgagtatctttagacacc

SEQ ID NO: 9689 - DNA, 25 bp, Artificial Sequence
  Synthetic Oligonucleotide
caacttcagcgtcctctgttggacc

SEQ ID NO: 9690 - DNA, 25 bp, Artificial Sequence
  Synthetic Oligonucleotide
gaactgacagcactacttcttgacc

SEQ ID NO: 9691 - DNA, 25 bp, Artificial Sequence
  Synthetic Oligonucleotide
gtgcgttaaccaactatttttaccg

SEQ ID NO: 9692 - DNA, 25 bp, Artificial Sequence
  Synthetic Oligonucleotide
gcgtcagaacactatgtcactaacc

SEQ ID NO: 9693 - DNA, 25 bp, Artificial Sequence
  Synthetic Oligonucleotide
ggaagacgacaaagcgcgagaaccg

SEQ ID NO: 9694 - DNA, 25 bp, Artificial Sequence
  Synthetic Oligonucleotide
atgaaccgcacgaccgactaaagtt

SEQ ID NO: 9695 - DNA, 25 bp, Artificial Sequence
  Synthetic Oligonucleotide
ctggcagtcagaaccacgagagatg

SEQ ID NO: 9696 - DNA, 25 bp, Artificial Sequence
  Synthetic Oligonucleotide
gaggggtcgtcactcccagagagag

SEQ ID NO: 9697 - DNA, 25 bp, Artificial Sequence
  Synthetic Oligonucleotide
gaggcggacttttcaactagaagag

SEQ ID NO: 9698 - DNA, 25 bp, Artificial Sequence
  Synthetic Oligonucleotide
ggtggagttgtctacaacagagtcg

SEQ ID NO: 9699 - DNA, 25 bp, Artificial Sequence
  Synthetic Oligonucleotide
gcggattatacgcccgacgaagtcg

SEQ ID NO: 9700 - DNA, 25 bp, Artificial Sequence
  Synthetic Oligonucleotide
ccgtaggaagaccgcacggacttgt

SEQ ID NO: 9701 - DNA, 25 bp, Artificial Sequence
  Synthetic Oligonucleotide
taacgagttagagcccaccgacttg

SEQ ID NO: 9702 - DNA, 25 bp, Artificial Sequence
  Synthetic Oligonucleotide
taacgagttagagcccaccgacttg

SEQ ID NO: 9703 - DNA, 18 bp, Artificial Sequence
  Synthetic Oligonucleotide
agttctacgatggcaagt

SEQ ID NO: 9704 - DNA, 16 bp, Artificial Sequence
  Synthetic Oligonucleotide
gttctacgatggcaag

SEQ ID NO: 9705 - DNA, 25 bp, Artificial Sequence
  Synthetic Oligonucleotide
accgttgttgtgaagtagtcatccc

SEQ ID NO: 9706 - DNA, 25 bp, Artificial Sequence
  Synthetic Oligonucleotide
aaaccttgtcagtaaggtttctctg

SEQ ID NO: 9707 - DNA, 25 bp, Artificial Sequence
  Synthetic Oligonucleotide
ctattacctgtgtgatcggtttttt

SEQ ID NO: 9708 - DNA, 25 bp, Artificial Sequence
  Synthetic Oligonucleotide
cagtcagtttagtgatggccggttt

SEQ ID NO: 9709 - DNA, 25 bp, Artificial Sequence
  Synthetic Oligonucleotide
caacgatcgtaatagggttccattt

SEQ ID NO: 9710 - DNA, 25 bp, Artificial Sequence
  Synthetic Oligonucleotide
gcccgatagaagaggggaccctcct

SEQ ID NO: 9711 - DNA, 25 bp, Artificial Sequence
  Synthetic Oligonucleotide
cccggtgcacgttgggaaacctctt

SEQ ID NO: 9712 - DNA, 25 bp, Artificial Sequence
  Synthetic Oligonucleotide
gcgttcgacgttaaggaaatcactg

SEQ ID NO: 9713 - DNA, 25 bp, Artificial Sequence
  Synthetic Oligonucleotide
cgtcgtagagtcgtggttaaataag

SEQ ID NO: 9714 - DNA, 20 bp, Artificial Sequence
  Synthetic Oligonucleotide
tcaactcctctttctttaat

SEQ ID NO: 9715 - DNA, 20 bp, Artificial Sequence
  Synthetic Oligonucleotide
tcaactcctctctctttaat

SEQ ID NO: 9716 - DNA, 20 bp, Artificial Sequence
  Synthetic Oligonucleotide
tcaactcctctttctttaat

SEQ ID NO: 9717 - DNA, 20 bp, Artificial Sequence
  Synthetic Oligonucleotide
tcaactcctctatctttaat

SEQ ID NO: 9718 - DNA, 20 bp, Artificial Sequence
  Synthetic Oligonucleotide
tcaactcctctttctttaat

SEQ ID NO: 9719 - DNA, 20 bp, Artificial Sequence
  Synthetic Oligonucleotide
tacatccgtgcgttgtcaat

SEQ ID NO: 9720 - DNA, 20 bp, Artificial Sequence
  Synthetic Oligonucleotide
tacatccgtacgttgtcaat

SEQ ID NO: 9721 - DNA, 20 bp, Artificial Sequence
  Synthetic Oligonucleotide
tacatccgtacgttgtcaat

SEQ ID NO: 9722 - DNA, 20 bp, Artificial Sequence
  Synthetic Oligonucleotide
tacatccgttcgttgtcaat

SEQ ID NO: 9723 - DNA, 20 bp, Artificial Sequence
  Synthetic Oligonucleotide
tacatccgtgcgttgtcaat

SEQ ID NO: 9724 - DNA, 20 bp, Artificial Sequence
  Synthetic Oligonucleotide
aggtcttctgttctccttta

SEQ ID NO: 9725 - DNA, 20 bp, Artificial Sequence
  Synthetic Oligonucleotide
aggtcttctgatctccttta

SEQ ID NO: 9726 - DNA, 20 bp, Artificial Sequence
  Synthetic Oligonucleotide
aggtcttctgatctccttta

SEQ ID NO: 9727 - DNA, 20 bp, Artificial Sequence
  Synthetic Oligonucleotide
aggtcttctgttctccttta

SEQ ID NO: 9728 - DNA, 20 bp, Artificial Sequence
  Synthetic Oligonucleotide
aggtcttctgctctccttta

SEQ ID NO: 9729 - DNA, 20 bp, Artificial Sequence
  Synthetic Oligonucleotide
accgtcctgtggcttatgaa

SEQ ID NO: 9730 - DNA, 20 bp, Artificial Sequence
  Synthetic Oligonucleotide
accgtcctgtgccttatgaa

SEQ ID NO: 9731 - DNA, 20 bp, Artificial Sequence
  Synthetic Oligonucleotide
accgtcctgtggcttatgaa

SEQ ID NO: 9732 - DNA, 20 bp, Artificial Sequence
  Synthetic Oligonucleotide
accgtcctgtgacttatgaa

SEQ ID NO: 9733 - DNA, 20 bp, Artificial Sequence
  Synthetic Oligonucleotide
accgtcctgtgtcttatgaa

SEQ ID NO: 9734 - DNA, 20 bp, Artificial Sequence
  Synthetic Oligonucleotide
cgacatatccctgcgtggtc

SEQ ID NO: 9735 - DNA, 20 bp, Artificial Sequence
  Synthetic Oligonucleotide
cgacatatccctgcgtggtc

SEQ ID NO: 9736 - DNA, 20 bp, Artificial Sequence
  Synthetic Oligonucleotide
cgacatatccctgcgtggtc

SEQ ID NO: 9737 - DNA, 20 bp, Artificial Sequence
  Synthetic Oligonucleotide
cgacatatccctacgtggtc

SEQ ID NO: 9738 - DNA, 20 bp, Artificial Sequence
  Synthetic Oligonucleotide
cgacatatccctacgtggtc

SEQ ID NO: 9739 - DNA, 20 bp, Artificial Sequence
  Synthetic Oligonucleotide
ggtgtcacaccttacaggtg

SEQ ID NO: 9740 - DNA, 20 bp, Artificial Sequence
  Synthetic Oligonucleotide
ggtgtcacgccttacaggtg

SEQ ID NO: 9741 - DNA, 20 bp, Artificial Sequence
  Synthetic Oligonucleotide
ggtgtcacgccttacaggtg

SEQ ID NO: 9742 - DNA, 20 bp, Artificial Sequence
  Synthetic Oligonucleotide
ggtgtcacaccttacaggtg

SEQ ID NO: 9743 - DNA, 20 bp, Artificial Sequence
  Synthetic Oligonucleotide
ggtgtcacaccttacaggtg

SEQ ID NO: 9744 - DNA, 20 bp, Artificial Sequence
  Synthetic Oligonucleotide
cagacttacgcccgtctcga

SEQ ID NO: 9745 - DNA, 20 bp, Artificial Sequence
  Synthetic Oligonucleotide
cagacttacacccgtctcga

SEQ ID NO: 9746 - DNA, 20 bp, Artificial Sequence
  Synthetic Oligonucleotide
cagacttacgcccgtctcga

SEQ ID NO: 9747 - DNA, 20 bp, Artificial Sequence
  Synthetic Oligonucleotide
cagacttacgcccgtctcga

SEQ ID NO: 9748 - DNA, 20 bp, Artificial Sequence
  Synthetic Oligonucleotide
cagacttacgcccgtctcga

SEQ ID NO: 9749 - DNA, 20 bp, Artificial Sequence
  Synthetic Oligonucleotide
ctggtagacctccctgtgtc

SEQ ID NO: 9750 - DNA, 20 bp, Artificial Sequence
  Synthetic Oligonucleotide
ctggtagacctccctgtgtc

SEQ ID NO: 9751 - DNA, 20 bp, Artificial Sequence
  Synthetic Oligonucleotide
ctggtagaccttcctgtgtc

SEQ ID NO: 9752 - DNA, 20 bp, Artificial Sequence
  Synthetic Oligonucleotide
ctggtagacctacctgtgtc

SEQ ID NO: 9753 - DNA, 20 bp, Artificial Sequence
  Synthetic Oligonucleotide
ctggtagacctccctgtgtc

SEQ ID NO: 9754 - DNA, 20 bp, Artificial Sequence
  Synthetic Oligonucleotide
actaaagatcccttccgaac

SEQ ID NO: 9755 - DNA, 20 bp, Artificial Sequence
  Synthetic Oligonucleotide
actaaagataccttccgaac

SEQ ID NO: 9756 - DNA, 20 bp, Artificial Sequence
  Synthetic Oligonucleotide
actaaagattccttccgaac

SEQ ID NO: 9757 - DNA, 20 bp, Artificial Sequence
  Synthetic Oligonucleotide
actaaagattccttccgaac

SEQ ID NO: 9758 - DNA, 20 bp, Artificial Sequence
  Synthetic Oligonucleotide
actaaagatcccttccgaac

SEQ ID NO: 9759 - DNA, 20 bp, Artificial Sequence
  Synthetic Oligonucleotide
gtaacgactcctgcggggag

SEQ ID NO: 9760 - DNA, 20 bp, Artificial Sequence
  Synthetic Oligonucleotide
gtaacgactcctacggggag

SEQ ID NO: 9761 - DNA, 20 bp, Artificial Sequence
  Synthetic Oligonucleotide
gtaacgactcctacggggag

SEQ ID NO: 9762 - DNA, 20 bp, Artificial Sequence
  Synthetic Oligonucleotide
gtaacgactcctgcggggag

SEQ ID NO: 9763 - DNA, 20 bp, Artificial Sequence
  Synthetic Oligonucleotide
gtaacgactcctacggggag

SEQ ID NO: 9764 - DNA, 20 bp, Artificial Sequence
  Synthetic Oligonucleotide
agagtacaaccttcaccgtc

SEQ ID NO: 9765 - DNA, 20 bp, Artificial Sequence
  Synthetic Oligonucleotide
agagtacatccttcaccgtc

SEQ ID NO: 9766 - DNA, 20 bp, Artificial Sequence
  Synthetic Oligonucleotide
agagtacatccttcaccgtc

SEQ ID NO: 9767 - DNA, 20 bp, Artificial Sequence
  Synthetic Oligonucleotide
agagtacacccttcaccgtc

SEQ ID NO: 9768 - DNA, 20 bp, Artificial Sequence
  Synthetic Oligonucleotide
agagtacacccttcaccgtc

SEQ ID NO: 9769 - DNA, 20 bp, Artificial Sequence
  Synthetic Oligonucleotide
gctgcaaacaccgactaggg

SEQ ID NO: 9770 - DNA, 20 bp, Artificial Sequence
  Synthetic Oligonucleotide
gctgcaaacaccgactaggg

SEQ ID NO: 9771 - DNA, 20 bp, Artificial Sequence
  Synthetic Oligonucleotide
gctgcaaacaccgactaggg

SEQ ID NO: 9772 - DNA, 20 bp, Artificial Sequence
  Synthetic Oligonucleotide
gctgcaaacaccgactaggg

SEQ ID NO: 9773 - DNA, 20 bp, Artificial Sequence
  Synthetic Oligonucleotide
gctgcaaactccgactaggg

SEQ ID NO: 9774 - DNA, 25 bp, Artificial Sequence
  Synthetic Oligonucleotide
cgaactaaagacattacagctggcg

SEQ ID NO: 9775 - DNA, 25 bp, Artificial Sequence
  Synthetic Oligonucleotide
aaaacttcagactcttaaatcgtcg

SEQ ID NO: 9776 - DNA, 25 bp, Artificial Sequence
  Synthetic Oligonucleotide
agtaccatcggctcgttagcttccg

SEQ ID NO: 9777 - DNA, 25 bp, Artificial Sequence
  Synthetic Oligonucleotide
cgtaaccgccgcactctagattccg

SEQ ID NO: 9778 - DNA, 25 bp, Artificial Sequence
  Synthetic Oligonucleotide
aactcccacggtattcagagtatcc

SEQ ID NO: 9779 - DNA, 25 bp, Artificial Sequence
  Synthetic Oligonucleotide
actcccacggttatcagagtatccg

SEQ ID NO: 9780 - DNA, 25 bp, Artificial Sequence
  Synthetic Oligonucleotide
ccaacatgtccagcgtgtactagcg

SEQ ID NO: 9781 - DNA, 25 bp, Artificial Sequence
  Synthetic Oligonucleotide
ccaataagttgatcgtggtacggcg

SEQ ID NO: 9782 - DNA, 25 bp, Artificial Sequence
  Synthetic Oligonucleotide
cttcctaaatttgacctgagtaagg

SEQ ID NO: 9783 - DNA, 25 bp, Artificial Sequence
  Synthetic Oligonucleotide
tcctagtgagttacattcgctggtg

SEQ ID NO: 9784 - DNA, 25 bp, Artificial Sequence
  Synthetic Oligonucleotide
agtctagtgagataccgttgctggg

SEQ ID NO: 9785 - DNA, 25 bp, Artificial Sequence
  Synthetic Oligonucleotide
atcgatgaagacgtcgttgggtgag

SEQ ID NO: 9786 - DNA, 25 bp, Artificial Sequence
  Synthetic Oligonucleotide
gtcgaacgcttcacgtcgtcgtagg

SEQ ID NO: 9787 - DNA, 25 bp, Artificial Sequence
  Synthetic Oligonucleotide
gggtcaaccactcctacggcacgag

SEQ ID NO: 9788 - DNA, 25 bp, Artificial Sequence
  Synthetic Oligonucleotide
aatgcggcaaccctacgcgccgtag

SEQ ID NO: 9789 - DNA, 25 bp, Artificial Sequence
  Synthetic Oligonucleotide
aaagtggtacaagcggtccgaccag

SEQ ID NO: 9790 - DNA, 25 bp, Artificial Sequence
  Synthetic Oligonucleotide
agtggtgcgcgagctagacgcaccg

SEQ ID NO: 9791 - DNA, 25 bp, Artificial Sequence
  Synthetic Oligonucleotide
tcgtcgccgcgcgcttagtacgccc

SEQ ID NO: 9792 - DNA, 25 bp, Artificial Sequence
  Synthetic Oligonucleotide
aagtacgccgacccgccagtcgccc

SEQ ID NO: 9793 - DNA, 25 bp, Artificial Sequence
  Synthetic Oligonucleotide
aatgtaccacttggccagcgacgcc

SEQ ID NO: 9794 - DNA, 25 bp, Artificial Sequence
  Synthetic Oligonucleotide
atcgacgccatacgtccgccgagcc

SEQ ID NO: 9795 - DNA, 25 bp, Artificial Sequence
  Synthetic Oligonucleotide
ctcgaccttaatcgcgccgacgacc

SEQ ID NO: 9796 - DNA, 25 bp, Artificial Sequence
  Synthetic Oligonucleotide
cccatcgaatagatgtccgacgacc

SEQ ID NO: 9797 - DNA, 25 bp, Artificial Sequence
  Synthetic Oligonucleotide
ccactcgaactgcacgtacgcggcc

SEQ ID NO: 9798 - DNA, 25 bp, Artificial Sequence
  Synthetic Oligonucleotide
cgactcgggtaggacgtgtaccacc

SEQ ID NO: 9799 - DNA, 25 bp, Artificial Sequence
  Synthetic Oligonucleotide
cgagtcgagtcgctcacgtcagccc

SEQ ID NO: 9800 - DNA, 25 bp, Artificial Sequence
  Synthetic Oligonucleotide
cctgtgagtcgaatctcgtagctcc

SEQ ID NO: 9801 - DNA, 25 bp, Artificial Sequence
  Synthetic Oligonucleotide
tagtctatgagtttctttagacacc

SEQ ID NO: 9802 - DNA, 25 bp, Artificial Sequence
  Synthetic Oligonucleotide
caacttcagcgtgctctgttggacc

SEQ ID NO: 9803 - DNA, 25 bp, Artificial Sequence
  Synthetic Oligonucleotide
gaactgacagcagtacttcttgacc

SEQ ID NO: 9804 - DNA, 25 bp, Artificial Sequence
  Synthetic Oligonucleotide
gtgcgttaaccatctatttttaccg

SEQ ID NO: 9805 - DNA, 25 bp, Artificial Sequence
  Synthetic Oligonucleotide
gcgtcagaacacaatgtcactaacc

SEQ ID NO: 9806 - DNA, 25 bp, Artificial Sequence
  Synthetic Oligonucleotide
ggaagacgacaatgcgcgagaaccg

SEQ ID NO: 9807 - DNA, 25 bp, Artificial Sequence
  Synthetic Oligonucleotide
atgaaccgcacgtccgactaaagtt

SEQ ID NO: 9808 - DNA, 25 bp, Artificial Sequence
  Synthetic Oligonucleotide
ctggcagtcagatccacgagagatg

SEQ ID NO: 9809 - DNA, 25 bp, Artificial Sequence
  Synthetic Oligonucleotide
gaggggtcgtcagtcccagagagag

SEQ ID NO: 9810 - DNA, 25 bp, Artificial Sequence
  Synthetic Oligonucleotide
gaggcggactttacaactagaagag

SEQ ID NO: 9811 - DNA, 25 bp, Artificial Sequence
  Synthetic Oligonucleotide
ggtggagttgtcaacaacagagtcg

SEQ ID NO: 9812 - DNA, 25 bp, Artificial Sequence
  Synthetic Oligonucleotide
gcggattatacggccgacgaagtcg

SEQ ID NO: 9813 - DNA, 25 bp, Artificial Sequence
  Synthetic Oligonucleotide
ccgtaggaagacggcacggacttgt

SEQ ID NO: 9814 - DNA, 25 bp, Artificial Sequence
  Synthetic Oligonucleotide
taacgagttagaccccaccgacttg

SEQ ID NO: 9815 - DNA, 25 bp, Artificial Sequence
  Synthetic Oligonucleotide
taacgagttagaccccaccgacttg

SEQ ID NO: 9816 - DNA, 16 bp, Artificial Sequence
  Synthetic Oligonucleotide
gttctacgatggcaag

SEQ ID NO: 9817 - DNA, 25 bp, Artificial Sequence
  Synthetic Oligonucleotide
ccgcatgtcgaggtagtgctaggcc

SEQ ID NO: 9818 - DNA, 25 bp, Artificial Sequence
  Synthetic Oligonucleotide
gacagaagtctgtgaggtctggtcc

SEQ ID NO: 9819 - DNA, 25 bp, Artificial Sequence
  Synthetic Oligonucleotide
acccctgaatggtgtggtctgtttt

SEQ ID NO: 9820 - DNA, 25 bp, Artificial Sequence
  Synthetic Oligonucleotide
accccaagtgtctaggtgtggattt

SEQ ID NO: 9821 - DNA, 25 bp, Artificial Sequence
  Synthetic Oligonucleotide
tccccgataatttggttgacgattt

SEQ ID NO: 9822 - DNA, 25 bp, Artificial Sequence
  Synthetic Oligonucleotide
caccttccgtcttgggaacattacg

SEQ ID NO: 9823 - DNA, 25 bp, Artificial Sequence
  Synthetic Oligonucleotide
ctgctgcgtctatgggtccatgtcg

SEQ ID NO: 9824 - DNA, 25 bp, Artificial Sequence
  Synthetic Oligonucleotide
ggtcgtctcatcttgggtcctaatg

SEQ ID NO: 9825 - DNA, 25 bp, Artificial Sequence
  Synthetic Oligonucleotide
gtgcctaacgtcttggaactgaaag

SEQ ID NO: 9826 - DNA, 20 bp, Artificial Sequence
  Synthetic Oligonucleotide
tcaactcctctatctttaat

SEQ ID NO: 9827 - DNA, 20 bp, Artificial Sequence
  Synthetic Oligonucleotide
tcaactcctctgtctttaat

SEQ ID NO: 9828 - DNA, 20 bp, Artificial Sequence
  Synthetic Oligonucleotide
tcaactcctctatctttaat

SEQ ID NO: 9829 - DNA, 20 bp, Artificial Sequence
  Synthetic Oligonucleotide
tcaactcctctctctttaat

SEQ ID NO: 9830 - DNA, 20 bp, Artificial Sequence
  Synthetic Oligonucleotide
tcaactcctctatctttaat

SEQ ID NO: 9831 - DNA, 20 bp, Artificial Sequence
  Synthetic Oligonucleotide
tacatccgttcgttgtcaat

SEQ ID NO: 9832 - DNA, 20 bp, Artificial Sequence
  Synthetic Oligonucleotide
tacatccgtccgttgtcaat

SEQ ID NO: 9833 - DNA, 20 bp, Artificial Sequence
  Synthetic Oligonucleotide
tacatccgtccgttgtcaat

SEQ ID NO: 9834 - DNA, 20 bp, Artificial Sequence
  Synthetic Oligonucleotide
tacatccgtacgttgtcaat

SEQ ID NO: 9835 - DNA, 20 bp, Artificial Sequence
  Synthetic Oligonucleotide
tacatccgttcgttgtcaat

SEQ ID NO: 9836 - DNA, 20 bp, Artificial Sequence
  Synthetic Oligonucleotide
aggtcttctgatctccttta

SEQ ID NO: 9837 - DNA, 20 bp, Artificial Sequence
  Synthetic Oligonucleotide
aggtcttctgctctccttta

SEQ ID NO: 9838 - DNA, 20 bp, Artificial Sequence
  Synthetic Oligonucleotide
aggtcttctgctctccttta

SEQ ID NO: 9839 - DNA, 20 bp, Artificial Sequence
  Synthetic Oligonucleotide
aggtcttctgatctccttta

SEQ ID NO: 9840 - DNA, 20 bp, Artificial Sequence
  Synthetic Oligonucleotide
aggtcttctggtctccttta

SEQ ID NO: 9841 - DNA, 20 bp, Artificial Sequence
  Synthetic Oligonucleotide
accgtcctgtgtcttatgaa

SEQ ID NO: 9842 - DNA, 20 bp, Artificial Sequence
  Synthetic Oligonucleotide
accgtcctgtggcttatgaa

SEQ ID NO: 9843 - DNA, 20 bp, Artificial Sequence
  Synthetic Oligonucleotide
accgtcctgtgtcttatgaa

SEQ ID NO: 9844 - DNA, 20 bp, Artificial Sequence
  Synthetic Oligonucleotide
accgtcctgtgccttatgaa

SEQ ID NO: 9845 - DNA, 20 bp, Artificial Sequence
  Synthetic Oligonucleotide
accgtcctgtgacttatgaa

SEQ ID NO: 9846 - DNA, 20 bp, Artificial Sequence
  Synthetic Oligonucleotide
cgacatatcccttcgtggtc

SEQ ID NO: 9847 - DNA, 20 bp, Artificial Sequence
  Synthetic Oligonucleotide
cgacatatcccttcgtggtc

SEQ ID NO: 9848 - DNA, 20 bp, Artificial Sequence
  Synthetic Oligonucleotide
cgacatatcccttcgtggtc

SEQ ID NO: 9849 - DNA, 20 bp, Artificial Sequence
  Synthetic Oligonucleotide
cgacatatccctccgtggtc

SEQ ID NO: 9850 - DNA, 20 bp, Artificial Sequence
  Synthetic Oligonucleotide
cgacatatccctccgtggtc

SEQ ID NO: 9851 - DNA, 20 bp, Artificial Sequence
  Synthetic Oligonucleotide
ggtgtcaccccttacaggtg

SEQ ID NO: 9852 - DNA, 20 bp, Artificial Sequence
  Synthetic Oligonucleotide
ggtgtcactccttacaggtg

SEQ ID NO: 9853 - DNA, 20 bp, Artificial Sequence
  Synthetic Oligonucleotide
ggtgtcactccttacaggtg

SEQ ID NO: 9854 - DNA, 20 bp, Artificial Sequence
  Synthetic Oligonucleotide
ggtgtcaccccttacaggtg

SEQ ID NO: 9855 - DNA, 20 bp, Artificial Sequence
  Synthetic Oligonucleotide
ggtgtcaccccttacaggtg

SEQ ID NO: 9856 - DNA, 20 bp, Artificial Sequence
  Synthetic Oligonucleotide
cagacttactcccgtctcga

SEQ ID NO: 9857 - DNA, 20 bp, Artificial Sequence
  Synthetic Oligonucleotide
cagacttacccccgtctcga

SEQ ID NO: 9858 - DNA, 20 bp, Artificial Sequence
  Synthetic Oligonucleotide
cagacttactcccgtctcga

SEQ ID NO: 9859 - DNA, 20 bp, Artificial Sequence
  Synthetic Oligonucleotide
cagacttactcccgtctcga

SEQ ID NO: 9860 - DNA, 20 bp, Artificial Sequence
  Synthetic Oligonucleotide
cagacttactcccgtctcga

SEQ ID NO: 9861 - DNA, 20 bp, Artificial Sequence
  Synthetic Oligonucleotide
ctggtagacctgcctgtgtc

SEQ ID NO: 9862 - DNA, 20 bp, Artificial Sequence
  Synthetic Oligonucleotide
ctggtagacctgcctgtgtc

SEQ ID NO: 9863 - DNA, 20 bp, Artificial Sequence
  Synthetic Oligonucleotide
ctggtagacctacctgtgtc

SEQ ID NO: 9864 - DNA, 20 bp, Artificial Sequence
  Synthetic Oligonucleotide
ctggtagacctccctgtgtc

SEQ ID NO: 9865 - DNA, 20 bp, Artificial Sequence
  Synthetic Oligonucleotide
ctggtagacctgcctgtgtc

SEQ ID NO: 9866 - DNA, 20 bp, Artificial Sequence
  Synthetic Oligonucleotide
actaaagatgccttccgaac

SEQ ID NO: 9867 - DNA, 20 bp, Artificial Sequence
  Synthetic Oligonucleotide
actaaagatcccttccgaac

SEQ ID NO: 9868 - DNA, 20 bp, Artificial Sequence
  Synthetic Oligonucleotide
actaaagataccttccgaac

SEQ ID NO: 9869 - DNA, 20 bp, Artificial Sequence
  Synthetic Oligonucleotide
actaaagataccttccgaac

SEQ ID NO: 9870 - DNA, 20 bp, Artificial Sequence
  Synthetic Oligonucleotide
actaaagatgccttccgaac

SEQ ID NO: 9871 - DNA, 20 bp, Artificial Sequence
  Synthetic Oligonucleotide
gtaacgactccttcggggag

SEQ ID NO: 9872 - DNA, 20 bp, Artificial Sequence
  Synthetic Oligonucleotide
gtaacgactcctccggggag

SEQ ID NO: 9873 - DNA, 20 bp, Artificial Sequence
  Synthetic Oligonucleotide
gtaacgactcctccggggag

SEQ ID NO: 9874 - DNA, 20 bp, Artificial Sequence
  Synthetic Oligonucleotide
gtaacgactccttcggggag

SEQ ID NO: 9875 - DNA, 20 bp, Artificial Sequence
  Synthetic Oligonucleotide
gtaacgactcctccggggag

SEQ ID NO: 9876 - DNA, 20 bp, Artificial Sequence
  Synthetic Oligonucleotide
agagtacacccttcaccgtc

SEQ ID NO: 9877 - DNA, 20 bp, Artificial Sequence
  Synthetic Oligonucleotide
agagtacaaccttcaccgtc

SEQ ID NO: 9878 - DNA, 20 bp, Artificial Sequence
  Synthetic Oligonucleotide
agagtacaaccttcaccgtc

SEQ ID NO: 9879 - DNA, 20 bp, Artificial Sequence
  Synthetic Oligonucleotide
agagtacagccttcaccgtc

SEQ ID NO: 9880 - DNA, 20 bp, Artificial Sequence
  Synthetic Oligonucleotide
agagtacagccttcaccgtc

SEQ ID NO: 9881 - DNA, 20 bp, Artificial Sequence
  Synthetic Oligonucleotide
gctgcaaaccccgactaggg

SEQ ID NO: 9882 - DNA, 20 bp, Artificial Sequence
  Synthetic Oligonucleotide
gctgcaaaccccgactaggg

SEQ ID NO: 9883 - DNA, 20 bp, Artificial Sequence
  Synthetic Oligonucleotide
gctgcaaaccccgactaggg

SEQ ID NO: 9884 - DNA, 20 bp, Artificial Sequence
  Synthetic Oligonucleotide
gctgcaaaccccgactaggg

SEQ ID NO: 9885 - DNA, 20 bp, Artificial Sequence
  Synthetic Oligonucleotide
gctgcaaacaccgactaggg

SEQ ID NO: 9886 - DNA, 25 bp, Artificial Sequence
  Synthetic Oligonucleotide
aacgttagcgacgttgacgcttgcg

SEQ ID NO: 9887 - DNA, 25 bp, Artificial Sequence
  Synthetic Oligonucleotide
tacacttggtaccgttcctgtcttg

SEQ ID NO: 9888 - DNA, 25 bp, Artificial Sequence
  Synthetic Oligonucleotide
agacctgttgtaccgatgatttatg

SEQ ID NO: 9889 - DNA, 25 bp, Artificial Sequence
  Synthetic Oligonucleotide
acgaggtcgttgcgattttagctag

SEQ ID NO: 9890 - DNA, 25 bp, Artificial Sequence
  Synthetic Oligonucleotide
acacgggcgtaacggaagtgttttg

SEQ ID NO: 9891 - DNA, 25 bp, Artificial Sequence
  Synthetic Oligonucleotide
tccatgccgaggtgaatgtatttgt

SEQ ID NO: 9892 - DNA, 25 bp, Artificial Sequence
  Synthetic Oligonucleotide
aaatccgataaacaagtattgtcgt

SEQ ID NO: 9893 - DNA, 25 bp, Artificial Sequence
  Synthetic Oligonucleotide
aaatagcaatcatcgaatttgtcgt

SEQ ID NO: 9894 - DNA, 25 bp, Artificial Sequence
  Synthetic Oligonucleotide
ctgaaaaaatcgtgttacttttgct

SEQ ID NO: 9895 - DNA, 25 bp, Artificial Sequence
  Synthetic Oligonucleotide
ctggagaaaaccactgtcttctttt

SEQ ID NO: 9896 - DNA, 25 bp, Artificial Sequence
  Synthetic Oligonucleotide
gacaaaagaacatttagctgctttt

SEQ ID NO: 9897 - DNA, 25 bp, Artificial Sequence
  Synthetic Oligonucleotide
tcaaaaaggaactacagtgcctgtt

SEQ ID NO: 9898 - DNA, 25 bp, Artificial Sequence
  Synthetic Oligonucleotide
tatcaaatagcttccgtgcctagag

SEQ ID NO: 9899 - DNA, 25 bp, Artificial Sequence
  Synthetic Oligonucleotide
acctacaacatcaggcggttccacg

SEQ ID NO: 9900 - DNA, 25 bp, Artificial Sequence
  Synthetic Oligonucleotide
caacttaatgatagcgccgtgccag

SEQ ID NO: 9901 - DNA, 25 bp, Artificial Sequence
  Synthetic Oligonucleotide
aatatttcgacctcggtcggccacg

SEQ ID NO: 9902 - DNA, 25 bp, Artificial Sequence
  Synthetic Oligonucleotide
ttacgaccgctacgtggacgacgcg

SEQ ID NO: 9903 - DNA, 25 bp, Artificial Sequence
  Synthetic Oligonucleotide
cctacgccgtcaccggtagagaacg

SEQ ID NO: 9904 - DNA, 25 bp, Artificial Sequence
  Synthetic Oligonucleotide
ctagcgtcgctccctcgacgagacg

SEQ ID NO: 9905 - DNA, 25 bp, Artificial Sequence
  Synthetic Oligonucleotide
atgaccagctgcacccggtacgacg

SEQ ID NO: 9906 - DNA, 25 bp, Artificial Sequence
  Synthetic Oligonucleotide
gcgtgccgcgacaccgtgaacgacg

SEQ ID NO: 9907 - DNA, 25 bp, Artificial Sequence
  Synthetic Oligonucleotide
cggtcaacgtacgcgtgtcgagcag

SEQ ID NO: 9908 - DNA, 25 bp, Artificial Sequence
  Synthetic Oligonucleotide
gcgcgaactacagcctctcgtagcc

SEQ ID NO: 9909 - DNA, 25 bp, Artificial Sequence
  Synthetic Oligonucleotide
cttccacacgacactccgtacgacc

SEQ ID NO: 9910 - DNA, 25 bp, Artificial Sequence
  Synthetic Oligonucleotide
gccgtaccgacgtagtccgaacgcg

SEQ ID NO: 9911 - DNA, 25 bp, Artificial Sequence
  Synthetic Oligonucleotide
gcgccgtgtctgaagtcagtagacc

SEQ ID NO: 9912 - DNA, 25 bp, Artificial Sequence
  Synthetic Oligonucleotide
gagggcggtctattaccagacgccg

SEQ ID NO: 9913 - DNA, 25 bp, Artificial Sequence
  Synthetic Oligonucleotide
agcaacggttatcactactgaaccg

SEQ ID NO: 9914 - DNA, 25 bp, Artificial Sequence
  Synthetic Oligonucleotide
ctgggagtagggtttacctgaaccg

SEQ ID NO: 9915 - DNA, 25 bp, Artificial Sequence
  Synthetic Oligonucleotide
ccggagaaggggtctttgagactct

SEQ ID NO: 9916 - DNA, 25 bp, Artificial Sequence
  Synthetic Oligonucleotide
gaaattcgagtcgtttgaacgtacg

SEQ ID NO: 9917 - DNA, 25 bp, Artificial Sequence
  Synthetic Oligonucleotide
taacgctgactactcttacgaaacg

SEQ ID NO: 9918 - DNA, 25 bp, Artificial Sequence
  Synthetic Oligonucleotide
gctgctcgactacgtgtgtgcaccg

SEQ ID NO: 9919 - DNA, 25 bp, Artificial Sequence
  Synthetic Oligonucleotide
ctgaaatggcactgtcgccttcacc

SEQ ID NO: 9920 - DNA, 25 bp, Artificial Sequence
  Synthetic Oligonucleotide
tcggcaagggcactccggtgcctcg

SEQ ID NO: 9921 - DNA, 25 bp, Artificial Sequence
  Synthetic Oligonucleotide
gatagaagaggaagctcaagtggcc

SEQ ID NO: 9922 - DNA, 25 bp, Artificial Sequence
  Synthetic Oligonucleotide
agaacgagcggtaccgaatcggacc

SEQ ID NO: 9923 - DNA, 25 bp, Artificial Sequence
  Synthetic Oligonucleotide
agaactagaagtaccaactaccccg

SEQ ID NO: 9924 - DNA, 25 bp, Artificial Sequence
  Synthetic Oligonucleotide
catcgaatagttgtccgacgacccg

SEQ ID NO: 9925 - DNA, 25 bp, Artificial Sequence
  Synthetic Oligonucleotide
accgtgtacttgagcccctactgcg

SEQ ID NO: 9926 - DNA, 25 bp, Artificial Sequence
  Synthetic Oligonucleotide
cctgcgttgcagctactccatgacg

SEQ ID NO: 9927 - DNA, 25 bp, Artificial Sequence
  Synthetic Oligonucleotide
tcaggtctgcgtcctaccgcactcc

SEQ ID NO: 9928 - DNA, 25 bp, Artificial Sequence
  Synthetic Oligonucleotide
cagcagttctacgatggcaagtcct

SEQ ID NO: 9929 - DNA, 25 bp, Artificial Sequence
  Synthetic Oligonucleotide
ccgcatgtcgagctagtgctaggcc

SEQ ID NO: 9930 - DNA, 25 bp, Artificial Sequence
  Synthetic Oligonucleotide
gacagaagtctgagaggtctggtcc

SEQ ID NO: 9931 - DNA, 25 bp, Artificial Sequence
  Synthetic Oligonucleotide
acccctgaatggagtggtctgtttt

SEQ ID NO: 9932 - DNA, 25 bp, Artificial Sequence
  Synthetic Oligonucleotide
accccaagtgtcaaggtgtggattt

SEQ ID NO: 9933 - DNA, 25 bp, Artificial Sequence
  Synthetic Oligonucleotide
tccccgataattaggttgacgattt

SEQ ID NO: 9934 - DNA, 25 bp, Artificial Sequence
  Synthetic Oligonucleotide
caccttccgtctagggaacattacg

SEQ ID NO: 9935 - DNA, 25 bp, Artificial Sequence
  Synthetic Oligonucleotide
ctgctgcgtctaagggtccatgtcg

SEQ ID NO: 9936 - DNA, 25 bp, Artificial Sequence
  Synthetic Oligonucleotide
ggtcgtctcatcatgggtcctaatg

SEQ ID NO: 9937 - DNA, 25 bp, Artificial Sequence
  Synthetic Oligonucleotide
gtgcctaacgtcatggaactgaaag

SEQ ID NO: 9938 - DNA, 20 bp, Artificial Sequence
  Synthetic Oligonucleotide
tcaactcctctctctttaat

SEQ ID NO: 9939 - DNA, 20 bp, Artificial Sequence
  Synthetic Oligonucleotide
tcaactcctctttctttaat

SEQ ID NO: 9940 - DNA, 20 bp, Artificial Sequence
  Synthetic Oligonucleotide
tcaactcctctctctttaat

SEQ ID NO: 9941 - DNA, 20 bp, Artificial Sequence
  Synthetic Oligonucleotide
tcaactcctctgtctttaat

SEQ ID NO: 9942 - DNA, 20 bp, Artificial Sequence
  Synthetic Oligonucleotide
tcaactcctctctctttaat

SEQ ID NO: 9943 - DNA, 20 bp, Artificial Sequence
  Synthetic Oligonucleotide
tacatccgtacgttgtcaat

SEQ ID NO: 9944 - DNA, 20 bp, Artificial Sequence
  Synthetic Oligonucleotide
tacatccgtgcgttgtcaat

SEQ ID NO: 9945 - DNA, 20 bp, Artificial Sequence
  Synthetic Oligonucleotide
tacatccgtgcgttgtcaat

SEQ ID NO: 9946 - DNA, 20 bp, Artificial Sequence
  Synthetic Oligonucleotide
tacatccgtccgttgtcaat

SEQ ID NO: 9947 - DNA, 20 bp, Artificial Sequence
  Synthetic Oligonucleotide
tacatccgtacgttgtcaat

SEQ ID NO: 9948 - DNA, 20 bp, Artificial Sequence
  Synthetic Oligonucleotide
aggtcttctgctctccttta

SEQ ID NO: 9949 - DNA, 20 bp, Artificial Sequence
  Synthetic Oligonucleotide
aggtcttctggtctccttta

SEQ ID NO: 9950 - DNA, 20 bp, Artificial Sequence
  Synthetic Oligonucleotide
aggtcttctggtctccttta

SEQ ID NO: 9951 - DNA, 20 bp, Artificial Sequence
  Synthetic Oligonucleotide
aggtcttctgctctccttta

SEQ ID NO: 9952 - DNA, 20 bp, Artificial Sequence
  Synthetic Oligonucleotide
aggtcttctgttctccttta

SEQ ID NO: 9953 - DNA, 20 bp, Artificial Sequence
  Synthetic Oligonucleotide
accgtcctgtgacttatgaa

SEQ ID NO: 9954 - DNA, 20 bp, Artificial Sequence
  Synthetic Oligonucleotide
accgtcctgtgtcttatgaa

SEQ ID NO: 9955 - DNA, 20 bp, Artificial Sequence
  Synthetic Oligonucleotide
accgtcctgtgacttatgaa

SEQ ID NO: 9956 - DNA, 20 bp, Artificial Sequence
  Synthetic Oligonucleotide
accgtcctgtggcttatgaa

SEQ ID NO: 9957 - DNA, 20 bp, Artificial Sequence
  Synthetic Oligonucleotide
accgtcctgtgccttatgaa

SEQ ID NO: 9958 - DNA, 20 bp, Artificial Sequence
  Synthetic Oligonucleotide
cgacatatccctacgtggtc

SEQ ID NO: 9959 - DNA, 20 bp, Artificial Sequence
  Synthetic Oligonucleotide
cgacatatccctacgtggtc

SEQ ID NO: 9960 - DNA, 20 bp, Artificial Sequence
  Synthetic Oligonucleotide
cgacatatccctacgtggtc

SEQ ID NO: 9961 - DNA, 20 bp, Artificial Sequence
  Synthetic Oligonucleotide
cgacatatccctgcgtggtc

SEQ ID NO: 9962 - DNA, 20 bp, Artificial Sequence
  Synthetic Oligonucleotide
cgacatatccctgcgtggtc

SEQ ID NO: 9963 - DNA, 20 bp, Artificial Sequence
  Synthetic Oligonucleotide
ggtgtcacgccttacaggtg

SEQ ID NO: 9964 - DNA, 20 bp, Artificial Sequence
  Synthetic Oligonucleotide
ggtgtcacaccttacaggtg

SEQ ID NO: 9965 - DNA, 20 bp, Artificial Sequence
  Synthetic Oligonucleotide
ggtgtcacaccttacaggtg

SEQ ID NO: 9966 - DNA, 20 bp, Artificial Sequence
  Synthetic Oligonucleotide
ggtgtcacgccttacaggtg

SEQ ID NO: 9967 - DNA, 20 bp, Artificial Sequence
  Synthetic Oligonucleotide
ggtgtcacgccttacaggtg

SEQ ID NO: 9968 - DNA, 20 bp, Artificial Sequence
  Synthetic Oligonucleotide
cagacttacacccgtctcga

SEQ ID NO: 9969 - DNA, 20 bp, Artificial Sequence
  Synthetic Oligonucleotide
cagacttacgcccgtctcga

SEQ ID NO: 9970 - DNA, 20 bp, Artificial Sequence
  Synthetic Oligonucleotide
cagacttacacccgtctcga

SEQ ID NO: 9971 - DNA, 20 bp, Artificial Sequence
  Synthetic Oligonucleotide
cagacttacacccgtctcga

SEQ ID NO: 9972 - DNA, 20 bp, Artificial Sequence
  Synthetic Oligonucleotide
cagacttacacccgtctcga

SEQ ID NO: 9973 - DNA, 20 bp, Artificial Sequence
  Synthetic Oligonucleotide
ctggtagaccttcctgtgtc

SEQ ID NO: 9974 - DNA, 20 bp, Artificial Sequence
  Synthetic Oligonucleotide
ctggtagaccttcctgtgtc

SEQ ID NO: 9975 - DNA, 20 bp, Artificial Sequence
  Synthetic Oligonucleotide
ctggtagacctccctgtgtc

SEQ ID NO: 9976 - DNA, 20 bp, Artificial Sequence
  Synthetic Oligonucleotide
ctggtagacctgcctgtgtc

SEQ ID NO: 9977 - DNA, 20 bp, Artificial Sequence
  Synthetic Oligonucleotide
ctggtagaccttcctgtgtc

SEQ ID NO: 9978 - DNA, 20 bp, Artificial Sequence
  Synthetic Oligonucleotide
actaaagattccttccgaac

SEQ ID NO: 9979 - DNA, 20 bp, Artificial Sequence
  Synthetic Oligonucleotide
actaaagatgccttccgaac

SEQ ID NO: 9980 - DNA, 20 bp, Artificial Sequence
  Synthetic Oligonucleotide
actaaagatcccttccgaac

SEQ ID NO: 9981 - DNA, 20 bp, Artificial Sequence
  Synthetic Oligonucleotide
actaaagatcccttccgaac

SEQ ID NO: 9982 - DNA, 20 bp, Artificial Sequence
  Synthetic Oligonucleotide
actaaagattccttccgaac

SEQ ID NO: 9983 - DNA, 20 bp, Artificial Sequence
  Synthetic Oligonucleotide
gtaacgactcctacggggag

SEQ ID NO: 9984 - DNA, 20 bp, Artificial Sequence
  Synthetic Oligonucleotide
gtaacgactcctgcggggag

SEQ ID NO: 9985 - DNA, 20 bp, Artificial Sequence
  Synthetic Oligonucleotide
gtaacgactcctgcggggag

SEQ ID NO: 9986 - DNA, 20 bp, Artificial Sequence
  Synthetic Oligonucleotide
gtaacgactcctacggggag

SEQ ID NO: 9987 - DNA, 20 bp, Artificial Sequence
  Synthetic Oligonucleotide
gtaacgactcctgcggggag

SEQ ID NO: 9988 - DNA, 20 bp, Artificial Sequence
  Synthetic Oligonucleotide
agagtacagccttcaccgtc

SEQ ID NO: 9989 - DNA, 20 bp, Artificial Sequence
  Synthetic Oligonucleotide
agagtacacccttcaccgtc

SEQ ID NO: 9990 - DNA, 20 bp, Artificial Sequence
  Synthetic Oligonucleotide
agagtacacccttcaccgtc

SEQ ID NO: 9991 - DNA, 20 bp, Artificial Sequence
  Synthetic Oligonucleotide
agagtacatccttcaccgtc

SEQ ID NO: 9992 - DNA, 20 bp, Artificial Sequence
  Synthetic Oligonucleotide
agagtacatccttcaccgtc

SEQ ID NO: 9993 - DNA, 20 bp, Artificial Sequence
  Synthetic Oligonucleotide
gctgcaaacgccgactaggg

SEQ ID NO: 9994 - DNA, 20 bp, Artificial Sequence
  Synthetic Oligonucleotide
gctgcaaacgccgactaggg

SEQ ID NO: 9995 - DNA, 20 bp, Artificial Sequence
  Synthetic Oligonucleotide
gctgcaaacgccgactaggg

SEQ ID NO: 9996 - DNA, 20 bp, Artificial Sequence
  Synthetic Oligonucleotide
gctgcaaacgccgactaggg

SEQ ID NO: 9997 - DNA, 20 bp, Artificial Sequence
  Synthetic Oligonucleotide
gctgcaaaccccgactaggg

SEQ ID NO: 9998 - DNA, 25 bp, Artificial Sequence
  Synthetic Oligonucleotide
aacgttagcgaccttgacgcttgcg

SEQ ID NO: 9999 - DNA, 25 bp, Artificial Sequence
  Synthetic Oligonucleotide
tacacttggtacggttcctgtcttg

SEQ ID NO: 10000 - DNA, 25 bp, Artificial Sequence
  Synthetic Oligonucleotide
agacctgttgtagcgatgatttatg

SEQ ID NO: 10001 - DNA, 25 bp, Artificial Sequence
  Synthetic Oligonucleotide
acgaggtcgttgggattttagctag

SEQ ID NO: 10002 - DNA, 25 bp, Artificial Sequence
  Synthetic Oligonucleotide
acacgggcgtaagggaagtgttttg

SEQ ID NO: 10003 - DNA, 25 bp, Artificial Sequence
  Synthetic Oligonucleotide
tccatgccgaggagaatgtatttgt

SEQ ID NO: 10004 - DNA, 25 bp, Artificial Sequence
  Synthetic Oligonucleotide
aaatccgataaagaagtattgtcgt

SEQ ID NO: 10005 - DNA, 25 bp, Artificial Sequence
  Synthetic Oligonucleotide
aaatagcaatcaacgaatttgtcgt

SEQ ID NO: 10006 - DNA, 25 bp, Artificial Sequence
  Synthetic Oligonucleotide
ctgaaaaaatcgagttacttttgct

SEQ ID NO: 10007 - DNA, 25 bp, Artificial Sequence
  Synthetic Oligonucleotide
ctggagaaaacctctgtcttctttt

SEQ ID NO: 10008 - DNA, 25 bp, Artificial Sequence
  Synthetic Oligonucleotide
gacaaaagaacaattagctgctttt

SEQ ID NO: 10009 - DNA, 25 bp, Artificial Sequence
  Synthetic Oligonucleotide
tcaaaaaggaacaacagtgcctgtt

SEQ ID NO: 10010 - DNA, 25 bp, Artificial Sequence
  Synthetic Oligonucleotide
tatcaaatagctaccgtgcctagag

SEQ ID NO: 10011 - DNA, 25 bp, Artificial Sequence
  Synthetic Oligonucleotide
acctacaacatctggcggttccacg

SEQ ID NO: 10012 - DNA, 25 bp, Artificial Sequence
  Synthetic Oligonucleotide
caacttaatgattgcgccgtgccag

SEQ ID NO: 10013 - DNA, 25 bp, Artificial Sequence
  Synthetic Oligonucleotide
aatatttcgaccacggtcggccacg

SEQ ID NO: 10014 - DNA, 25 bp, Artificial Sequence
  Synthetic Oligonucleotide
ttacgaccgctaggtggacgacgcg

SEQ ID NO: 10015 - DNA, 25 bp, Artificial Sequence
  Synthetic Oligonucleotide
cctacgccgtcagcggtagagaacg

SEQ ID NO: 10016 - DNA, 25 bp, Artificial Sequence
  Synthetic Oligonucleotide
ctagcgtcgctcgctcgacgagacg

SEQ ID NO: 10017 - DNA, 25 bp, Artificial Sequence
  Synthetic Oligonucleotide
atgaccagctgctcccggtacgacg

SEQ ID NO: 10018 - DNA, 25 bp, Artificial Sequence
  Synthetic Oligonucleotide
gcgtgccgcgactccgtgaacgacg

SEQ ID NO: 10019 - DNA, 25 bp, Artificial Sequence
  Synthetic Oligonucleotide
cggtcaacgtacccgtgtcgagcag

SEQ ID NO: 10020 - DNA, 25 bp, Artificial Sequence
  Synthetic Oligonucleotide
gcgcgaactacaccctctcgtagcc

SEQ ID NO: 10021 - DNA, 25 bp, Artificial Sequence
  Synthetic Oligonucleotide
cttccacacgactctccgtacgacc

SEQ ID NO: 10022 - DNA, 25 bp, Artificial Sequence
  Synthetic Oligonucleotide
gccgtaccgacgaagtccgaacgcg

SEQ ID NO: 10023 - DNA, 25 bp, Artificial Sequence
  Synthetic Oligonucleotide
gcgccgtgtctgtagtcagtagacc

SEQ ID NO: 10024 - DNA, 25 bp, Artificial Sequence
  Synthetic Oligonucleotide
gagggcggtctaataccagacgccg

SEQ ID NO: 10025 - DNA, 25 bp, Artificial Sequence
  Synthetic Oligonucleotide
agcaacggttatgactactgaaccg

SEQ ID NO: 10026 - DNA, 25 bp, Artificial Sequence
  Synthetic Oligonucleotide
ctgggagtagggattacctgaaccg

SEQ ID NO: 10027 - DNA, 25 bp, Artificial Sequence
  Synthetic Oligonucleotide
ccggagaaggggactttgagactct

SEQ ID NO: 10028 - DNA, 25 bp, Artificial Sequence
  Synthetic Oligonucleotide
gaaattcgagtcctttgaacgtacg

SEQ ID NO: 10029 - DNA, 25 bp, Artificial Sequence
  Synthetic Oligonucleotide
taacgctgactagtcttacgaaacg

SEQ ID NO: 10030 - DNA, 25 bp, Artificial Sequence
  Synthetic Oligonucleotide
gctgctcgactaggtgtgtgcaccg

SEQ ID NO: 10031 - DNA, 25 bp, Artificial Sequence
  Synthetic Oligonucleotide
ctgaaatggcacagtcgccttcacc

SEQ ID NO: 10032 - DNA, 25 bp, Artificial Sequence
  Synthetic Oligonucleotide
tcggcaagggcagtccggtgcctcg

SEQ ID NO: 10033 - DNA, 25 bp, Artificial Sequence
  Synthetic Oligonucleotide
gatagaagaggatgctcaagtggcc

SEQ ID NO: 10034 - DNA, 25 bp, Artificial Sequence
  Synthetic Oligonucleotide
agaacgagcggttccgaatcggacc

SEQ ID NO: 10035 - DNA, 25 bp, Artificial Sequence
  Synthetic Oligonucleotide
agaactagaagttccaactaccccg

SEQ ID NO: 10036 - DNA, 25 bp, Artificial Sequence
  Synthetic Oligonucleotide
catcgaatagttctccgacgacccg

SEQ ID NO: 10037 - DNA, 25 bp, Artificial Sequence
  Synthetic Oligonucleotide
accgtgtacttgtgcccctactgcg

SEQ ID NO: 10038 - DNA, 25 bp, Artificial Sequence
  Synthetic Oligonucleotide
cctgcgttgcaggtactccatgacg

SEQ ID NO: 10039 - DNA, 25 bp, Artificial Sequence
  Synthetic Oligonucleotide
tcaggtctgcgtgctaccgcactcc

SEQ ID NO: 10040 - DNA, 25 bp, Artificial Sequence
  Synthetic Oligonucleotide
cagcagttctacgatggcaagtcct

SEQ ID NO: 10041 - DNA, 25 bp, Artificial Sequence
  Synthetic Oligonucleotide
aggacttgccatcgtagaactgctg

SEQ ID NO: 10042 - DNA, 25 bp, Artificial Sequence
  Synthetic Oligonucleotide
cgaaagcgagaccaggcagaacgcg

SEQ ID NO: 10043 - DNA, 25 bp, Artificial Sequence
  Synthetic Oligonucleotide
ccaaccgtagtactaggcgcgctgg

SEQ ID NO: 10044 - DNA, 25 bp, Artificial Sequence
  Synthetic Oligonucleotide
atgtaagcgtaggacgggctcctgg

SEQ ID NO: 10045 - DNA, 25 bp, Artificial Sequence
  Synthetic Oligonucleotide
ctagaacgcgaggtggcgtcccacc

SEQ ID NO: 10046 - DNA, 25 bp, Artificial Sequence
  Synthetic Oligonucleotide
gccctagaagaagctggagccaaag

SEQ ID NO: 10047 - DNA, 25 bp, Artificial Sequence
  Synthetic Oligonucleotide
cacccaaagaagagggtccatgagt

SEQ ID NO: 10048 - DNA, 25 bp, Artificial Sequence
  Synthetic Oligonucleotide
tgcgaatgttatcgggtccatcggt

SEQ ID NO: 10049 - DNA, 25 bp, Artificial Sequence
  Synthetic Oligonucleotide
ttgtcctaatctatgggaccatcag

SEQ ID NO: 10050 - DNA, 25 bp, Artificial Sequence
  Synthetic Oligonucleotide
ttgtcctaatctatgggaccatcag

SEQ ID NO: 10051 - DNA, 25 bp, Artificial Sequence
  Synthetic Oligonucleotide
ttgtcctaatctatgggaccatcag

SEQ ID NO: 10052 - DNA, 20 bp, Artificial Sequence
  Synthetic Oligonucleotide
tcaactcctctgtctttaat

SEQ ID NO: 10053 - DNA, 20 bp, Artificial Sequence
  Synthetic Oligonucleotide
tcaactcctctatctttaat

SEQ ID NO: 10054 - DNA, 20 bp, Artificial Sequence
  Synthetic Oligonucleotide
tcaactcctctgtctttaat

SEQ ID NO: 10055 - DNA, 20 bp, Artificial Sequence
  Synthetic Oligonucleotide
tcaactcctctttctttaat

SEQ ID NO: 10056 - DNA, 20 bp, Artificial Sequence
  Synthetic Oligonucleotide
tcaactcctctgtctttaat

SEQ ID NO: 10057 - DNA, 20 bp, Artificial Sequence
  Synthetic Oligonucleotide
tacatccgtccgttgtcaat

SEQ ID NO: 10058 - DNA, 20 bp, Artificial Sequence
  Synthetic Oligonucleotide
tacatccgttcgttgtcaat

SEQ ID NO: 10059 - DNA, 20 bp, Artificial Sequence
  Synthetic Oligonucleotide
tacatccgttcgttgtcaat

SEQ ID NO: 10060 - DNA, 20 bp, Artificial Sequence
  Synthetic Oligonucleotide
tacatccgtgcgttgtcaat

SEQ ID NO: 10061 - DNA, 20 bp, Artificial Sequence
  Synthetic Oligonucleotide
tacatccgtccgttgtcaat

SEQ ID NO: 10062 - DNA, 20 bp, Artificial Sequence
  Synthetic Oligonucleotide
aggtcttctggtctccttta

SEQ ID NO: 10063 - DNA, 20 bp, Artificial Sequence
  Synthetic Oligonucleotide
aggtcttctgttctccttta

SEQ ID NO: 10064 - DNA, 20 bp, Artificial Sequence
  Synthetic Oligonucleotide
aggtcttctgttctccttta

SEQ ID NO: 10065 - DNA, 20 bp, Artificial Sequence
  Synthetic Oligonucleotide
aggtcttctggtctccttta

SEQ ID NO: 10066 - DNA, 20 bp, Artificial Sequence
  Synthetic Oligonucleotide
aggtcttctgatctccttta

SEQ ID NO: 10067 - DNA, 20 bp, Artificial Sequence
  Synthetic Oligonucleotide
accgtcctgtgccttatgaa

SEQ ID NO: 10068 - DNA, 20 bp, Artificial Sequence
  Synthetic Oligonucleotide
accgtcctgtgacttatgaa

SEQ ID NO: 10069 - DNA, 20 bp, Artificial Sequence
  Synthetic Oligonucleotide
accgtcctgtgccttatgaa

SEQ ID NO: 10070 - DNA, 20 bp, Artificial Sequence
  Synthetic Oligonucleotide
accgtcctgtgtcttatgaa

SEQ ID NO: 10071 - DNA, 20 bp, Artificial Sequence
  Synthetic Oligonucleotide
accgtcctgtggcttatgaa

SEQ ID NO: 10072 - DNA, 20 bp, Artificial Sequence
  Synthetic Oligonucleotide
cgacatatccctccgtggtc

SEQ ID NO: 10073 - DNA, 20 bp, Artificial Sequence
  Synthetic Oligonucleotide
cgacatatccctccgtggtc

SEQ ID NO: 10074 - DNA, 20 bp, Artificial Sequence
  Synthetic Oligonucleotide
cgacatatccctccgtggtc

SEQ ID NO: 10075 - DNA, 20 bp, Artificial Sequence
  Synthetic Oligonucleotide
cgacatatcccttcgtggtc

SEQ ID NO: 10076 - DNA, 20 bp, Artificial Sequence
  Synthetic Oligonucleotide
cgacatatcccttcgtggtc

SEQ ID NO: 10077 - DNA, 20 bp, Artificial Sequence
  Synthetic Oligonucleotide
ggtgtcactccttacaggtg

SEQ ID NO: 10078 - DNA, 20 bp, Artificial Sequence
  Synthetic Oligonucleotide
ggtgtcaccccttacaggtg

SEQ ID NO: 10079 - DNA, 20 bp, Artificial Sequence
  Synthetic Oligonucleotide
ggtgtcaccccttacaggtg

SEQ ID NO: 10080 - DNA, 20 bp, Artificial Sequence
  Synthetic Oligonucleotide
ggtgtcactccttacaggtg

SEQ ID NO: 10081 - DNA, 20 bp, Artificial Sequence
  Synthetic Oligonucleotide
ggtgtcactccttacaggtg

SEQ ID NO: 10082 - DNA, 20 bp, Artificial Sequence
  Synthetic Oligonucleotide
cagacttacccccgtctcga

SEQ ID NO: 10083 - DNA, 20 bp, Artificial Sequence
  Synthetic Oligonucleotide
cagacttactcccgtctcga

SEQ ID NO: 10084 - DNA, 20 bp, Artificial Sequence
  Synthetic Oligonucleotide
cagacttacccccgtctcga

SEQ ID NO: 10085 - DNA, 20 bp, Artificial Sequence
  Synthetic Oligonucleotide
cagacttacccccgtctcga

SEQ ID NO: 10086 - DNA, 20 bp, Artificial Sequence
  Synthetic Oligonucleotide
cagacttacccccgtctcga

SEQ ID NO: 10087 - DNA, 20 bp, Artificial Sequence
  Synthetic Oligonucleotide
ctggtagacctacctgtgtc

SEQ ID NO: 10088 - DNA, 20 bp, Artificial Sequence
  Synthetic Oligonucleotide
ctggtagacctacctgtgtc

SEQ ID NO: 10089 - DNA, 20 bp, Artificial Sequence
  Synthetic Oligonucleotide
ctggtagacctgcctgtgtc

SEQ ID NO: 10090 - DNA, 20 bp, Artificial Sequence
  Synthetic Oligonucleotide
ctggtagaccttcctgtgtc

SEQ ID NO: 10091 - DNA, 20 bp, Artificial Sequence
  Synthetic Oligonucleotide
ctggtagacctacctgtgtc

SEQ ID NO: 10092 - DNA, 20 bp, Artificial Sequence
  Synthetic Oligonucleotide
actaaagataccttccgaac

SEQ ID NO: 10093 - DNA, 20 bp, Artificial Sequence
  Synthetic Oligonucleotide
actaaagattccttccgaac

SEQ ID NO: 10094 - DNA, 20 bp, Artificial Sequence
  Synthetic Oligonucleotide
actaaagatgccttccgaac

SEQ ID NO: 10095 - DNA, 20 bp, Artificial Sequence
  Synthetic Oligonucleotide
actaaagatgccttccgaac

SEQ ID NO: 10096 - DNA, 20 bp, Artificial Sequence
  Synthetic Oligonucleotide
actaaagataccttccgaac

SEQ ID NO: 10097 - DNA, 20 bp, Artificial Sequence
  Synthetic Oligonucleotide
gtaacgactcctccggggag

SEQ ID NO: 10098 - DNA, 20 bp, Artificial Sequence
  Synthetic Oligonucleotide
gtaacgactccttcggggag

SEQ ID NO: 10099 - DNA, 20 bp, Artificial Sequence
  Synthetic Oligonucleotide
gtaacgactccttcggggag

SEQ ID NO: 10100 - DNA, 20 bp, Artificial Sequence
  Synthetic Oligonucleotide
gtaacgactcctccggggag

SEQ ID NO: 10101 - DNA, 20 bp, Artificial Sequence
  Synthetic Oligonucleotide
gtaacgactccttcggggag

SEQ ID NO: 10102 - DNA, 20 bp, Artificial Sequence
  Synthetic Oligonucleotide
agagtacatccttcaccgtc

SEQ ID NO: 10103 - DNA, 20 bp, Artificial Sequence
  Synthetic Oligonucleotide
agagtacagccttcaccgtc

SEQ ID NO: 10104 - DNA, 20 bp, Artificial Sequence
  Synthetic Oligonucleotide
agagtacagccttcaccgtc

SEQ ID NO: 10105 - DNA, 20 bp, Artificial Sequence
  Synthetic Oligonucleotide
agagtacaaccttcaccgtc

SEQ ID NO: 10106 - DNA, 20 bp, Artificial Sequence
  Synthetic Oligonucleotide
agagtacaaccttcaccgtc

SEQ ID NO: 10107 - DNA, 20 bp, Artificial Sequence
  Synthetic Oligonucleotide
gctgcaaactccgactaggg

SEQ ID NO: 10108 - DNA, 20 bp, Artificial Sequence
  Synthetic Oligonucleotide
gctgcaaactccgactaggg

SEQ ID NO: 10109 - DNA, 20 bp, Artificial Sequence
  Synthetic Oligonucleotide
gctgcaaactccgactaggg

SEQ ID NO: 10110 - DNA, 20 bp, Artificial Sequence
  Synthetic Oligonucleotide
gctgcaaactccgactaggg

SEQ ID NO: 10111 - DNA, 20 bp, Artificial Sequence
  Synthetic Oligonucleotide
gctgcaaacgccgactaggg

SEQ ID NO: 10112 - DNA, 25 bp, Artificial Sequence
  Synthetic Oligonucleotide
cttaacagcgggatgctggacaggg

SEQ ID NO: 10113 - DNA, 25 bp, Artificial Sequence
  Synthetic Oligonucleotide
tcaagacggtagaagttcaacaaat

SEQ ID NO: 10114 - DNA, 25 bp, Artificial Sequence
  Synthetic Oligonucleotide
acccaaagtagaagaccgaacaatt

SEQ ID NO: 10115 - DNA, 25 bp, Artificial Sequence
  Synthetic Oligonucleotide
ctggtgtagtaggtgccaagatatg

SEQ ID NO: 10116 - DNA, 25 bp, Artificial Sequence
  Synthetic Oligonucleotide
ttcggttggaggatcgacagattcg

SEQ ID NO: 10117 - DNA, 25 bp, Artificial Sequence
  Synthetic Oligonucleotide
ttgagtagtggaagatcagcttatg

SEQ ID NO: 10118 - DNA, 25 bp, Artificial Sequence
  Synthetic Oligonucleotide
gtggacaaaccagacgcgttagtcg

SEQ ID NO: 10119 - DNA, 25 bp, Artificial Sequence
  Synthetic Oligonucleotide
tgagcagtaactcgaacgacttgcg

SEQ ID NO: 10120 - DNA, 25 bp, Artificial Sequence
  Synthetic Oligonucleotide
aaactagtaccgagtctaacttgcg

SEQ ID NO: 10121 - DNA, 25 bp, Artificial Sequence
  Synthetic Oligonucleotide
gaaatgtgtcggtttactctactcc

SEQ ID NO: 10122 - DNA, 25 bp, Artificial Sequence
  Synthetic Oligonucleotide
caccaaagcgatctatcatctatcc

SEQ ID NO: 10123 - DNA, 25 bp, Artificial Sequence
  Synthetic Oligonucleotide
caccaaaggccaaggtgtcagcggt

SEQ ID NO: 10124 - DNA, 25 bp, Artificial Sequence
  Synthetic Oligonucleotide
atcaaagcacctacggtgtcctgag

SEQ ID NO: 10125 - DNA, 25 bp, Artificial Sequence
  Synthetic Oligonucleotide
ctagacaaccatctagcggtcccag

SEQ ID NO: 10126 - DNA, 25 bp, Artificial Sequence
  Synthetic Oligonucleotide
tttcaaactcttatccagttccagt

SEQ ID NO: 10127 - DNA, 25 bp, Artificial Sequence
  Synthetic Oligonucleotide
tcagaaagtccaaacccttacgcag

SEQ ID NO: 10128 - DNA, 25 bp, Artificial Sequence
  Synthetic Oligonucleotide
acacgtccatccggacgtgtccacg

SEQ ID NO: 10129 - DNA, 25 bp, Artificial Sequence
  Synthetic Oligonucleotide
ggcaggccatcggacgacggaaacg

SEQ ID NO: 10130 - DNA, 25 bp, Artificial Sequence
  Synthetic Oligonucleotide
agacctaggcttctccgctcgaaag

SEQ ID NO: 10131 - DNA, 25 bp, Artificial Sequence
  Synthetic Oligonucleotide
gtggcacccttccttcgctctgaag

SEQ ID NO: 10132 - DNA, 25 bp, Artificial Sequence
  Synthetic Oligonucleotide
acgagcttcagatctcgttgtatcg

SEQ ID NO: 10133 - DNA, 25 bp, Artificial Sequence
  Synthetic Oligonucleotide
tggaacggcttttgctgcacgaacg

SEQ ID NO: 10134 - DNA, 25 bp, Artificial Sequence
  Synthetic Oligonucleotide
cgactagccttcctctgctagcacg

SEQ ID NO: 10135 - DNA, 25 bp, Artificial Sequence
  Synthetic Oligonucleotide
tttaaacctgtagtctgctgttacg

SEQ ID NO: 10136 - DNA, 25 bp, Artificial Sequence
  Synthetic Oligonucleotide
gaacctgtactagcgtcgttactcc

SEQ ID NO: 10137 - DNA, 25 bp, Artificial Sequence
  Synthetic Oligonucleotide
cccgacacactgttaggtcttgtcc

SEQ ID NO: 10138 - DNA, 25 bp, Artificial Sequence
  Synthetic Oligonucleotide
gacgcgcacctgtaggcgttgaccg

SEQ ID NO: 10139 - DNA, 25 bp, Artificial Sequence
  Synthetic Oligonucleotide
ggtcacggtgatcctcgtctgaccg

SEQ ID NO: 10140 - DNA, 25 bp, Artificial Sequence
  Synthetic Oligonucleotide
taggtgtggtcgtcccggtgacact

SEQ ID NO: 10141 - DNA, 25 bp, Artificial Sequence
  Synthetic Oligonucleotide
ttgagtcctgtcctacctcgggtcc

SEQ ID NO: 10142 - DNA, 25 bp, Artificial Sequence
  Synthetic Oligonucleotide
gaggcatgtacgcccactggacgag

SEQ ID NO: 10143 - DNA, 25 bp, Artificial Sequence
  Synthetic Oligonucleotide
acacgtagacgggacacaggacgag

SEQ ID NO: 10144 - DNA, 25 bp, Artificial Sequence
  Synthetic Oligonucleotide
actgctgtcggtacgtcgtggacag

SEQ ID NO: 10145 - DNA, 25 bp, Artificial Sequence
  Synthetic Oligonucleotide
ctgctcgacacgcgtacgttgaccg

SEQ ID NO: 10146 - DNA, 25 bp, Artificial Sequence
  Synthetic Oligonucleotide
ccagcgggaacgcggtcaacgtacg

SEQ ID NO: 10147 - DNA, 25 bp, Artificial Sequence
  Synthetic Oligonucleotide
tcagagcgagacagcgggtccgacc

SEQ ID NO: 10148 - DNA, 25 bp, Artificial Sequence
  Synthetic Oligonucleotide
ccaaagtggtacaaccggtccgacc

SEQ ID NO: 10149 - DNA, 25 bp, Artificial Sequence
  Synthetic Oligonucleotide
aactagtaggtcgacactgtcctcc

SEQ ID NO: 10150 - DNA, 25 bp, Artificial Sequence
  Synthetic Oligonucleotide
atatgagtttcgaccgtcgactccg

SEQ ID NO: 10151 - DNA, 25 bp, Artificial Sequence
  Synthetic Oligonucleotide
taagacgtaatgcccgtacatcgcg

SEQ ID NO: 10152 - DNA, 25 bp, Artificial Sequence
  Synthetic Oligonucleotide
agtagtggtagcggtcgcactaccg

SEQ ID NO: 10153 - DNA, 25 bp, Artificial Sequence
  Synthetic Oligonucleotide
atgtgcgccgtaccgacgtagtccg

SEQ ID NO: 10154 - DNA, 25 bp, Artificial Sequence
  Synthetic Oligonucleotide
tcaggacatggcatgtgagacttcc

SEQ ID NO: 10155 - DNA, 25 bp, Artificial Sequence
  Synthetic Oligonucleotide
aggacttgccatcgtagaactgctg

SEQ ID NO: 10156 - DNA, 25 bp, Artificial Sequence
  Synthetic Oligonucleotide
cagcagttctacgatggcaagtcct

SEQ ID NO: 10157 - DNA, 25 bp, Artificial Sequence
  Synthetic Oligonucleotide
cgaaagcgagacgaggcagaacgcg

SEQ ID NO: 10158 - DNA, 25 bp, Artificial Sequence
  Synthetic Oligonucleotide
ccaaccgtagtagtaggcgcgctgg

SEQ ID NO: 10159 - DNA, 25 bp, Artificial Sequence
  Synthetic Oligonucleotide
atgtaagcgtagcacgggctcctgg

SEQ ID NO: 10160 - DNA, 25 bp, Artificial Sequence
  Synthetic Oligonucleotide
ctagaacgcgagctggcgtcccacc

SEQ ID NO: 10161 - DNA, 25 bp, Artificial Sequence
  Synthetic Oligonucleotide
gccctagaagaacctggagccaaag

SEQ ID NO: 10162 - DNA, 25 bp, Artificial Sequence
  Synthetic Oligonucleotide
cacccaaagaagtgggtccatgagt

SEQ ID NO: 10163 - DNA, 25 bp, Artificial Sequence
  Synthetic Oligonucleotide
tgcgaatgttatggggtccatcggt

SEQ ID NO: 10164 - DNA, 25 bp, Artificial Sequence
  Synthetic Oligonucleotide
ttgtcctaatctttgggaccatcag

SEQ ID NO: 10165 - DNA, 25 bp, Artificial Sequence
  Synthetic Oligonucleotide
ttgtcctaatctttgggaccatcag

SEQ ID NO: 10166 - DNA, 25 bp, Artificial Sequence
  Synthetic Oligonucleotide
ttgtcctaatctttgggaccatcag

SEQ ID NO: 10167 - DNA, 25 bp, Artificial Sequence
  Synthetic Oligonucleotide
cttaacagcgggttgctggacaggg

SEQ ID NO: 10168 - DNA, 25 bp, Artificial Sequence
  Synthetic Oligonucleotide
tcaagacggtagtagttcaacaaat

SEQ ID NO: 10169 - DNA, 25 bp, Artificial Sequence
  Synthetic Oligonucleotide
acccaaagtagatgaccgaacaatt

SEQ ID NO: 10170 - DNA, 25 bp, Artificial Sequence
  Synthetic Oligonucleotide
ctggtgtagtagctgccaagatatg

SEQ ID NO: 10171 - DNA, 25 bp, Artificial Sequence
  Synthetic Oligonucleotide
ttcggttggaggttcgacagattcg

SEQ ID NO: 10172 - DNA, 25 bp, Artificial Sequence
  Synthetic Oligonucleotide
ttgagtagtggatgatcagcttatg

SEQ ID NO: 10173 - DNA, 25 bp, Artificial Sequence
  Synthetic Oligonucleotide
gtggacaaaccacacgcgttagtcg

SEQ ID NO: 10174 - DNA, 25 bp, Artificial Sequence
  Synthetic Oligonucleotide
tgagcagtaactggaacgacttgcg

SEQ ID NO: 10175 - DNA, 25 bp, Artificial Sequence
  Synthetic Oligonucleotide
aaactagtaccgtgtctaacttgcg

SEQ ID NO: 10176 - DNA, 25 bp, Artificial Sequence
  Synthetic Oligonucleotide
gaaatgtgtcggattactctactcc

SEQ ID NO: 10177 - DNA, 25 bp, Artificial Sequence
  Synthetic Oligonucleotide
caccaaagcgatgtatcatctatcc

SEQ ID NO: 10178 - DNA, 25 bp, Artificial Sequence
  Synthetic Oligonucleotide
caccaaaggccatggtgtcagcggt

SEQ ID NO: 10179 - DNA, 25 bp, Artificial Sequence
  Synthetic Oligonucleotide
atcaaagcaccttcggtgtcctgag

SEQ ID NO: 10180 - DNA, 25 bp, Artificial Sequence
  Synthetic Oligonucleotide
ctagacaaccatgtagcggtcccag

SEQ ID NO: 10181 - DNA, 25 bp, Artificial Sequence
  Synthetic Oligonucleotide
tttcaaactcttttccagttccagt

SEQ ID NO: 10182 - DNA, 25 bp, Artificial Sequence
  Synthetic Oligonucleotide
tcagaaagtccatacccttacgcag

SEQ ID NO: 10183 - DNA, 25 bp, Artificial Sequence
  Synthetic Oligonucleotide
acacgtccatcccgacgtgtccacg

SEQ ID NO: 10184 - DNA, 25 bp, Artificial Sequence
  Synthetic Oligonucleotide
ggcaggccatcgcacgacggaaacg

SEQ ID NO: 10185 - DNA, 25 bp, Artificial Sequence
  Synthetic Oligonucleotide
agacctaggcttgtccgctcgaaag

SEQ ID NO: 10186 - DNA, 25 bp, Artificial Sequence
  Synthetic Oligonucleotide
gtggcacccttcgttcgctctgaag

SEQ ID NO: 10187 - DNA, 25 bp, Artificial Sequence
  Synthetic Oligonucleotide
acgagcttcagaactcgttgtatcg

SEQ ID NO: 10188 - DNA, 25 bp, Artificial Sequence
  Synthetic Oligonucleotide
tggaacggctttagctgcacgaacg

SEQ ID NO: 10189 - DNA, 25 bp, Artificial Sequence
  Synthetic Oligonucleotide
cgactagccttcgtctgctagcacg

SEQ ID NO: 10190 - DNA, 25 bp, Artificial Sequence
  Synthetic Oligonucleotide
tttaaacctgtactctgctgttacg

SEQ ID NO: 10191 - DNA, 25 bp, Artificial Sequence
  Synthetic Oligonucleotide
gaacctgtactaccgtcgttactcc

SEQ ID NO: 10192 - DNA, 25 bp, Artificial Sequence
  Synthetic Oligonucleotide
cccgacacactgataggtcttgtcc

SEQ ID NO: 10193 - DNA, 25 bp, Artificial Sequence
  Synthetic Oligonucleotide
gacgcgcacctgaaggcgttgaccg

SEQ ID NO: 10194 - DNA, 25 bp, Artificial Sequence
  Synthetic Oligonucleotide
ggtcacggtgatgctcgtctgaccg

SEQ ID NO: 10195 - DNA, 25 bp, Artificial Sequence
  Synthetic Oligonucleotide
taggtgtggtcgacccggtgacact

SEQ ID NO: 10196 - DNA, 25 bp, Artificial Sequence
  Synthetic Oligonucleotide
ttgagtcctgtcgtacctcgggtcc

SEQ ID NO: 10197 - DNA, 25 bp, Artificial Sequence
  Synthetic Oligonucleotide
gaggcatgtacggccactggacgag

SEQ ID NO: 10198 - DNA, 25 bp, Artificial Sequence
  Synthetic Oligonucleotide
acacgtagacggcacacaggacgag

SEQ ID NO: 10199 - DNA, 25 bp, Artificial Sequence
  Synthetic Oligonucleotide
actgctgtcggttcgtcgtggacag

SEQ ID NO: 10200 - DNA, 25 bp, Artificial Sequence
  Synthetic Oligonucleotide
ctgctcgacacgggtacgttgaccg

SEQ ID NO: 10201 - DNA, 25 bp, Artificial Sequence
  Synthetic Oligonucleotide
ccagcgggaacggggtcaacgtacg

SEQ ID NO: 10202 - DNA, 25 bp, Artificial Sequence
  Synthetic Oligonucleotide
tcagagcgagactgcgggtccgacc

SEQ ID NO: 10203 - DNA, 25 bp, Artificial Sequence
  Synthetic Oligonucleotide
ccaaagtggtactaccggtccgacc

SEQ ID NO: 10204 - DNA, 25 bp, Artificial Sequence
  Synthetic Oligonucleotide
aactagtaggtccacactgtcctcc

SEQ ID NO: 10205 - DNA, 25 bp, Artificial Sequence
  Synthetic Oligonucleotide
atatgagtttcgtccgtcgactccg

SEQ ID NO: 10206 - DNA, 25 bp, Artificial Sequence
  Synthetic Oligonucleotide
taagacgtaatggccgtacatcgcg

SEQ ID NO: 10207 - DNA, 25 bp, Artificial Sequence
  Synthetic Oligonucleotide
agtagtggtagccgtcgcactaccg

SEQ ID NO: 10208 - DNA, 25 bp, Artificial Sequence
  Synthetic Oligonucleotide
atgtgcgccgtagcgacgtagtccg

SEQ ID NO: 10209 - DNA, 25 bp, Artificial Sequence
  Synthetic Oligonucleotide
tcaggacatggcttgtgagacttcc

SEQ ID NO: 10210 - DNA, 25 bp, Artificial Sequence
  Synthetic Oligonucleotide
cagcagttctacgatggcaagtcct

SEQ ID NO: 10211 - DNA, 25 bp, Artificial Sequence
  Synthetic Oligonucleotide
aggacttgccatcgtagaactgctg

SEQ ID NO: 10212 - DNA, 25 bp, Artificial Sequence
  Synthetic Oligonucleotide
agaactagaagtaggaacgaccccg

SEQ ID NO: 10213 - DNA, 25 bp, Artificial Sequence
  Synthetic Oligonucleotide
gacatgacaggtaaatagtcctacc

SEQ ID NO: 10214 - DNA, 25 bp, Artificial Sequence
  Synthetic Oligonucleotide
agtagaagaccgaacaattcctacc

SEQ ID NO: 10215 - DNA, 25 bp, Artificial Sequence
  Synthetic Oligonucleotide
acgcaatcgacgtcgtgattccccg

SEQ ID NO: 10216 - DNA, 25 bp, Artificial Sequence
  Synthetic Oligonucleotide
ccagatgtaccgttgacactcctcc

SEQ ID NO: 10217 - DNA, 25 bp, Artificial Sequence
  Synthetic Oligonucleotide
tttcctagaagagtcggattctttt

SEQ ID NO: 10218 - DNA, 25 bp, Artificial Sequence
  Synthetic Oligonucleotide
tttccgattcttgctggttaccttt

SEQ ID NO: 10219 - DNA, 25 bp, Artificial Sequence
  Synthetic Oligonucleotide
cactccatctctctttggtcgcatt

SEQ ID NO: 10220 - DNA, 25 bp, Artificial Sequence
  Synthetic Oligonucleotide
cccgtcgattaactttgatccctag

SEQ ID NO: 10221 - DNA, 25 bp, Artificial Sequence
  Synthetic Oligonucleotide
ctcccagttctatggggagaacctg

SEQ ID NO: 10222 - DNA, 25 bp, Artificial Sequence
  Synthetic Oligonucleotide
tataccaggctctggcgttaaattg

SEQ ID NO: 10223 - DNA, 25 bp, Artificial Sequence
  Synthetic Oligonucleotide
ttatgcttaccctggcgaaaagatg

SEQ ID NO: 10224 - DNA, 25 bp, Artificial Sequence
  Synthetic Oligonucleotide
tgcgttacgcaaggctgcaagtccg

SEQ ID NO: 10225 - DNA, 25 bp, Artificial Sequence
  Synthetic Oligonucleotide
tagtcgacagaagactgcaagtctg

SEQ ID NO: 10226 - DNA, 25 bp, Artificial Sequence
  Synthetic Oligonucleotide
atagacgaaaaggacgtctaagtcc

SEQ ID NO: 10227 - DNA, 25 bp, Artificial Sequence
  Synthetic Oligonucleotide
catagagaggaagacgtcgaggacc

SEQ ID NO: 10228 - DNA, 25 bp, Artificial Sequence
  Synthetic Oligonucleotide
aaacgagacggaacttcgccttacc

SEQ ID NO: 10229 - DNA, 25 bp, Artificial Sequence
  Synthetic Oligonucleotide
agagcgaggaccttctaccactacc

SEQ ID NO: 10230 - DNA, 25 bp, Artificial Sequence
  Synthetic Oligonucleotide
ccggtgactcgatagtatccactcc

SEQ ID NO: 10231 - DNA, 25 bp, Artificial Sequence
  Synthetic Oligonucleotide
cggtgactcgatagtatccactccg

SEQ ID NO: 10232 - DNA, 25 bp, Artificial Sequence
  Synthetic Oligonucleotide
gtcactcttagaagtactcactcag

SEQ ID NO: 10233 - DNA, 25 bp, Artificial Sequence
  Synthetic Oligonucleotide
agaacctcaggaactcacactacag

SEQ ID NO: 10234 - DNA, 25 bp, Artificial Sequence
  Synthetic Oligonucleotide
aggagtaacctctagacctccaagg

SEQ ID NO: 10235 - DNA, 25 bp, Artificial Sequence
  Synthetic Oligonucleotide
cacgaaaacccgtcgccttggcgag

SEQ ID NO: 10236 - DNA, 25 bp, Artificial Sequence
  Synthetic Oligonucleotide
cgcgagcatcactccctcatgggag

SEQ ID NO: 10237 - DNA, 25 bp, Artificial Sequence
  Synthetic Oligonucleotide
gaagtcattgctactctcctgggag

SEQ ID NO: 10238 - DNA, 25 bp, Artificial Sequence
  Synthetic Oligonucleotide
atatttttgactctctcctccggag

SEQ ID NO: 10239 - DNA, 25 bp, Artificial Sequence
  Synthetic Oligonucleotide
ttttcatgtcctctctcttaccttg

SEQ ID NO: 10240 - DNA, 25 bp, Artificial Sequence
  Synthetic Oligonucleotide
ttcacagttctcggctcttccgtgg

SEQ ID NO: 10241 - DNA, 25 bp, Artificial Sequence
  Synthetic Oligonucleotide
ttttcacgttttgtacaggtctgag

SEQ ID NO: 10242 - DNA, 25 bp, Artificial Sequence
  Synthetic Oligonucleotide
agtttaggtcttgtacggcgtctcc

SEQ ID NO: 10243 - DNA, 25 bp, Artificial Sequence
  Synthetic Oligonucleotide
actgttaagacgattgtagttttcc

SEQ ID NO: 10244 - DNA, 25 bp, Artificial Sequence
  Synthetic Oligonucleotide
cgttatggagacagtacgaatatcc

SEQ ID NO: 10245 - DNA, 25 bp, Artificial Sequence
  Synthetic Oligonucleotide
cacttaagacgaagtgttactatcc

SEQ ID NO: 10246 - DNA, 25 bp, Artificial Sequence
  Synthetic Oligonucleotide
cacttaagacgaagtgttactatcc

SEQ ID NO: 10247 - DNA, 25 bp, Artificial Sequence
  Synthetic Oligonucleotide
caacttccagagtttgtactagacc

SEQ ID NO: 10248 - DNA, 25 bp, Artificial Sequence
  Synthetic Oligonucleotide
aaacggtacccaccttagtataacc

SEQ ID NO: 10249 - DNA, 25 bp, Artificial Sequence
  Synthetic Oligonucleotide
tagaggtgaaacggtgacgtttacc

SEQ ID NO: 10250 - DNA, 25 bp, Artificial Sequence
  Synthetic Oligonucleotide
tggacgtcttataagggttactacc

SEQ ID NO: 10251 - DNA, 25 bp, Artificial Sequence
  Synthetic Oligonucleotide
acggtagcctacacgggtctaccct

SEQ ID NO: 10252 - DNA, 25 bp, Artificial Sequence
  Synthetic Oligonucleotide
cggtcgtgactaaaccggacctacc

SEQ ID NO: 10253 - DNA, 25 bp, Artificial Sequence
  Synthetic Oligonucleotide
caggtaacttacgcggtacacaccg

SEQ ID NO: 10254 - DNA, 25 bp, Artificial Sequence
  Synthetic Oligonucleotide
ccgcgtcgaacttcaagagcagccg

SEQ ID NO: 10255 - DNA, 25 bp, Artificial Sequence
  Synthetic Oligonucleotide
ctgtcgggatcctcgtagcagtggt

SEQ ID NO: 10256 - DNA, 25 bp, Artificial Sequence
  Synthetic Oligonucleotide
ttaaggaatgcctgtagctgtagtg

SEQ ID NO: 10257 - DNA, 25 bp, Artificial Sequence
  Synthetic Oligonucleotide
ctgaagcattgccactgctactgcg

SEQ ID NO: 10258 - DNA, 25 bp, Artificial Sequence
  Synthetic Oligonucleotide
ctcgaactgatttggtatgttttcg

SEQ ID NO: 10259 - DNA, 25 bp, Artificial Sequence
  Synthetic Oligonucleotide
tcaataatacttagtagtttctcag

SEQ ID NO: 10260 - DNA, 25 bp, Artificial Sequence
  Synthetic Oligonucleotide
aaacactaccgtggagatgtttcag

SEQ ID NO: 10261 - DNA, 25 bp, Artificial Sequence
  Synthetic Oligonucleotide
accaagtacgggtagtgtttgtacc

SEQ ID NO: 10262 - DNA, 25 bp, Artificial Sequence
  Synthetic Oligonucleotide
accaagtgtgggtagtgtttgtacc

SEQ ID NO: 10263 - DNA, 25 bp, Artificial Sequence
  Synthetic Oligonucleotide
accaagtgcgggtagtgtttgtacc

SEQ ID NO: 10264 - DNA, 25 bp, Artificial Sequence
  Synthetic Oligonucleotide
agcaaaagtaacacgattttttcag

SEQ ID NO: 10265 - DNA, 25 bp, Artificial Sequence
  Synthetic Oligonucleotide
tagaagtgcctgttctattttacag

SEQ ID NO: 10266 - DNA, 25 bp, Artificial Sequence
  Synthetic Oligonucleotide
tcggagtgctcctcacatacataag

SEQ ID NO: 10267 - DNA, 25 bp, Artificial Sequence
  Synthetic Oligonucleotide
attcacgcacaccactactataacg

SEQ ID NO: 10268 - DNA, 25 bp, Artificial Sequence
  Synthetic Oligonucleotide
gggactactgactctaccgcctttg

SEQ ID NO: 10269 - DNA, 25 bp, Artificial Sequence
  Synthetic Oligonucleotide
ggcggatcttcgtaaacgccacctg

SEQ ID NO: 10270 - DNA, 25 bp, Artificial Sequence
  Synthetic Oligonucleotide
cgccggaacttctattatcccttcg

SEQ ID NO: 10271 - DNA, 25 bp, Artificial Sequence
  Synthetic Oligonucleotide
ccggaattaaagtagtatcctgcgt

SEQ ID NO: 10272 - DNA, 25 bp, Artificial Sequence
  Synthetic Oligonucleotide
ataatatgtaaaggtatatctctcc

SEQ ID NO: 10273 - DNA, 25 bp, Artificial Sequence
  Synthetic Oligonucleotide
ctttgttaagaccgagtatcctcct

SEQ ID NO: 10274 - DNA, 25 bp, Artificial Sequence
  Synthetic Oligonucleotide
tgttgtgacacaaccgtatctccag

SEQ ID NO: 10275 - DNA, 25 bp, Artificial Sequence
  Synthetic Oligonucleotide
ttataagacttactctatccgcgag

SEQ ID NO: 10276 - DNA, 25 bp, Artificial Sequence
  Synthetic Oligonucleotide
tttctatctctttaccacgcctgcg

SEQ ID NO: 10277 - DNA, 25 bp, Artificial Sequence
  Synthetic Oligonucleotide
tgagtcgattctcgtagctcccccg

SEQ ID NO: 10278 - DNA, 25 bp, Artificial Sequence
  Synthetic Oligonucleotide
gagtcacttatctgatatacccttg

SEQ ID NO: 10279 - DNA, 25 bp, Artificial Sequence
  Synthetic Oligonucleotide
tctactatgtcttctaagctcttcg

SEQ ID NO: 10280 - DNA, 25 bp, Artificial Sequence
  Synthetic Oligonucleotide
tcgcgacttcttgtagcgccgcgcg

SEQ ID NO: 10281 - DNA, 25 bp, Artificial Sequence
  Synthetic Oligonucleotide
cgcgactcgtgtgtctccccgaccg

SEQ ID NO: 10282 - DNA, 25 bp, Artificial Sequence
  Synthetic Oligonucleotide
gacggagtcggagggctcatcgacc

SEQ ID NO: 10283 - DNA, 25 bp, Artificial Sequence
  Synthetic Oligonucleotide
acaggtctgagtcgtacttggaccg

SEQ ID NO: 10284 - DNA, 25 bp, Artificial Sequence
  Synthetic Oligonucleotide
gacgagcgcaggccgtctttccgcg

SEQ ID NO: 10285 - DNA, 25 bp, Artificial Sequence
  Synthetic Oligonucleotide
aaatgaccatgtcagagttatcccg

SEQ ID NO: 10286 - DNA, 25 bp, Artificial Sequence
  Synthetic Oligonucleotide
ataaaggacttcagaagtagattcc

SEQ ID NO: 10287 - DNA, 25 bp, Artificial Sequence
  Synthetic Oligonucleotide
aataatcactatcgaacgagatttg

SEQ ID NO: 10288 - DNA, 25 bp, Artificial Sequence
  Synthetic Oligonucleotide
taaaagggtaatcgggataactctg

SEQ ID NO: 10289 - DNA, 25 bp, Artificial Sequence
  Synthetic Oligonucleotide
taaaaggttttgggtgtgtaaggat

SEQ ID NO: 10290 - DNA, 25 bp, Artificial Sequence
  Synthetic Oligonucleotide
caaaaggtcttcactttgatagttt

SEQ ID NO: 10291 - DNA, 25 bp, Artificial Sequence
  Synthetic Oligonucleotide
acgacaatacttgtttatcggattt

SEQ ID NO: 10292 - DNA, 25 bp, Artificial Sequence
  Synthetic Oligonucleotide
ggtaagatatctagtttggtccttt

SEQ ID NO: 10293 - DNA, 25 bp, Artificial Sequence
  Synthetic Oligonucleotide
ttaaacgctctttagttggccgttt

SEQ ID NO: 10294 - DNA, 25 bp, Artificial Sequence
  Synthetic Oligonucleotide
cgaactgagttgtcgttggcggttt

SEQ ID NO: 10295 - DNA, 25 bp, Artificial Sequence
  Synthetic Oligonucleotide
agggctaagaggtcgctggcaactt

SEQ ID NO: 10296 - DNA, 25 bp, Artificial Sequence
  Synthetic Oligonucleotide
gcgacacgaaggtcaccggcacctg

SEQ ID NO: 10297 - DNA, 25 bp, Artificial Sequence
  Synthetic Oligonucleotide
gtacaaccggtccgaccagaacttg

SEQ ID NO: 10298 - DNA, 25 bp, Artificial Sequence
  Synthetic Oligonucleotide
gcgacgcggctagatcaactattcg

SEQ ID NO: 10299 - DNA, 25 bp, Artificial Sequence
  Synthetic Oligonucleotide
atcgagttacaaacaacgtaagtcg

SEQ ID NO: 10300 - DNA, 25 bp, Artificial Sequence
  Synthetic Oligonucleotide
acagtttcagacaagactacagtag

SEQ ID NO: 10301 - DNA, 25 bp, Artificial Sequence
  Synthetic Oligonucleotide
aaacattcacatgatgtactcaacg

SEQ ID NO: 10302 - DNA, 25 bp, Artificial Sequence
  Synthetic Oligonucleotide
atatagtcgctttgtatacgtcaag

SEQ ID NO: 10303 - DNA, 25 bp, Artificial Sequence
  Synthetic Oligonucleotide
tcaagatccctttcgactcgatccg

SEQ ID NO: 10304 - DNA, 25 bp, Artificial Sequence
  Synthetic Oligonucleotide
ttcaaatcctttagtgtgtatctag

SEQ ID NO: 10305 - DNA, 25 bp, Artificial Sequence
  Synthetic Oligonucleotide
tcaaatcctttagtgtgtatctagt

SEQ ID NO: 10306 - DNA, 25 bp, Artificial Sequence
  Synthetic Oligonucleotide
tacgaaaacctttacgctgttcttg

SEQ ID NO: 10307 - DNA, 25 bp, Artificial Sequence
  Synthetic Oligonucleotide
attcaaaaggtcttcactttgatag

SEQ ID NO: 10308 - DNA, 25 bp, Artificial Sequence
  Synthetic Oligonucleotide
gacgaaatagtactaacccataatg

SEQ ID NO: 10309 - DNA, 25 bp, Artificial Sequence
  Synthetic Oligonucleotide
agaccgagtatcctcctctttcatg

SEQ ID NO: 10310 - DNA, 25 bp, Artificial Sequence
  Synthetic Oligonucleotide
gtgctacatctcgtcacctttcaag

SEQ ID NO: 10311 - DNA, 25 bp, Artificial Sequence
  Synthetic Oligonucleotide
gtgccgctctgtcgccgattcacag

SEQ ID NO: 10312 - DNA, 25 bp, Artificial Sequence
  Synthetic Oligonucleotide
tgtgctacgccggggccctgtccag

SEQ ID NO: 10313 - DNA, 25 bp, Artificial Sequence
  Synthetic Oligonucleotide
cgtccgacggctcgtgcccggtttg

SEQ ID NO: 10314 - DNA, 25 bp, Artificial Sequence
  Synthetic Oligonucleotide
gcccgacggttgtcccggcgaaacg

SEQ ID NO: 10315 - DNA, 25 bp, Artificial Sequence
  Synthetic Oligonucleotide
cctgagaggtctacccgtgccgaag

SEQ ID NO: 10316 - DNA, 25 bp, Artificial Sequence
  Synthetic Oligonucleotide
gttgaagcggacgttgccgacgtag

SEQ ID NO: 10317 - DNA, 25 bp, Artificial Sequence
  Synthetic Oligonucleotide
cgcgcttaagcgacagttagctttg

SEQ ID NO: 10318 - DNA, 25 bp, Artificial Sequence
  Synthetic Oligonucleotide
gctcaaacgcggacggtatttcgtg

SEQ ID NO: 10319 - DNA, 25 bp, Artificial Sequence
  Synthetic Oligonucleotide
gccaactagcggcgcgtagattacc

SEQ ID NO: 10320 - DNA, 25 bp, Artificial Sequence
  Synthetic Oligonucleotide
gccaccactgggctgtgacttaccg

SEQ ID NO: 10321 - DNA, 25 bp, Artificial Sequence
  Synthetic Oligonucleotide
gtcgcctttgcgagtcgtggttacc

SEQ ID NO: 10322 - DNA, 25 bp, Artificial Sequence
  Synthetic Oligonucleotide
cattcctcttggtccgtgagttccg

SEQ ID NO: 10323 - DNA, 25 bp, Artificial Sequence
  Synthetic Oligonucleotide
ttttcgtcgggaccactggtccgcg

SEQ ID NO: 10324 - DNA, 25 bp, Artificial Sequence
  Synthetic Oligonucleotide
tagtccgagggcaacgagtgctacg

SEQ ID NO: 10325 - DNA, 25 bp, Artificial Sequence
  Synthetic Oligonucleotide
agtcggagcggctcgtagtagtacc

SEQ ID NO: 10326 - DNA, 25 bp, Artificial Sequence
  Synthetic Oligonucleotide
gagtcggcgctcgtgtacctcgacc

SEQ ID NO: 10327 - DNA, 25 bp, Artificial Sequence
  Synthetic Oligonucleotide
gcgtgtcgagcagcctgacctcccg

SEQ ID NO: 10328 - DNA, 25 bp, Artificial Sequence
  Synthetic Oligonucleotide
ggtgttacgtcgactccgccttacc

SEQ ID NO: 10329 - DNA, 25 bp, Artificial Sequence
  Synthetic Oligonucleotide
gtacctactgaaaccgatctcctcg

SEQ ID NO: 10330 - DNA, 25 bp, Artificial Sequence
  Synthetic Oligonucleotide
gaactagaagtaccacgatcctcgg

SEQ ID NO: 10331 - DNA, 25 bp, Artificial Sequence
  Synthetic Oligonucleotide
agcatgactcgtcctaatggtaccg

SEQ ID NO: 10332 - DNA, 25 bp, Artificial Sequence
  Synthetic Oligonucleotide
ttcaagatctaggtaactctgttcg

SEQ ID NO: 10333 - DNA, 25 bp, Artificial Sequence
  Synthetic Oligonucleotide
tcgggtagctgtggctgttacgtcg

SEQ ID NO: 10334 - DNA, 25 bp, Artificial Sequence
  Synthetic Oligonucleotide
gtggagctacagccgagtagtgtag

SEQ ID NO: 10335 - DNA, 25 bp, Artificial Sequence
  Synthetic Oligonucleotide
aaacgtgcagtcttggcgatgctcg

SEQ ID NO: 10336 - DNA, 25 bp, Artificial Sequence
  Synthetic Oligonucleotide
aggacttgccatcgtagaactgctg

SEQ ID NO: 10337 - DNA, 25 bp, Artificial Sequence
  Synthetic Oligonucleotide
cagcagttctacgatggcaagtcct

SEQ ID NO: 10338 - DNA, 25 bp, Artificial Sequence
  Synthetic Oligonucleotide
agaactagaagttggaacgaccccg

SEQ ID NO: 10339 - DNA, 25 bp, Artificial Sequence
  Synthetic Oligonucleotide
gacatgacaggttaatagtcctacc

SEQ ID NO: 10340 - DNA, 25 bp, Artificial Sequence
  Synthetic Oligonucleotide
agtagaagaccgtacaattcctacc

SEQ ID NO: 10341 - DNA, 25 bp, Artificial Sequence
  Synthetic Oligonucleotide
acgcaatcgacgacgtgattccccg

SEQ ID NO: 10342 - DNA, 25 bp, Artificial Sequence
  Synthetic Oligonucleotide
ccagatgtaccgatgacactcctcc

SEQ ID NO: 10343 - DNA, 25 bp, Artificial Sequence
  Synthetic Oligonucleotide
tttcctagaagactcggattctttt

SEQ ID NO: 10344 - DNA, 25 bp, Artificial Sequence
  Synthetic Oligonucleotide
tttccgattcttcctggttaccttt

SEQ ID NO: 10345 - DNA, 25 bp, Artificial Sequence
  Synthetic Oligonucleotide
cactccatctctgtttggtcgcatt

SEQ ID NO: 10346 - DNA, 25 bp, Artificial Sequence
  Synthetic Oligonucleotide
cccgtcgattaagtttgatccctag

SEQ ID NO: 10347 - DNA, 25 bp, Artificial Sequence
  Synthetic Oligonucleotide
ctcccagttctaaggggagaacctg

SEQ ID NO: 10348 - DNA, 25 bp, Artificial Sequence
  Synthetic Oligonucleotide
tataccaggctcaggcgttaaattg

SEQ ID NO: 10349 - DNA, 25 bp, Artificial Sequence
  Synthetic Oligonucleotide
ttatgcttacccaggcgaaaagatg

SEQ ID NO: 10350 - DNA, 25 bp, Artificial Sequence
  Synthetic Oligonucleotide
tgcgttacgcaacgctgcaagtccg

SEQ ID NO: 10351 - DNA, 25 bp, Artificial Sequence
  Synthetic Oligonucleotide
tagtcgacagaacactgcaagtctg

SEQ ID NO: 10352 - DNA, 25 bp, Artificial Sequence
  Synthetic Oligonucleotide
atagacgaaaagcacgtctaagtcc

SEQ ID NO: 10353 - DNA, 25 bp, Artificial Sequence
  Synthetic Oligonucleotide
catagagaggaacacgtcgaggacc

SEQ ID NO: 10354 - DNA, 25 bp, Artificial Sequence
  Synthetic Oligonucleotide
aaacgagacggatcttcgccttacc

SEQ ID NO: 10355 - DNA, 25 bp, Artificial Sequence
  Synthetic Oligonucleotide
agagcgaggaccatctaccactacc

SEQ ID NO: 10356 - DNA, 25 bp, Artificial Sequence
  Synthetic Oligonucleotide
ccggtgactcgaaagtatccactcc

SEQ ID NO: 10357 - DNA, 25 bp, Artificial Sequence
  Synthetic Oligonucleotide
cggtgactcgattgtatccactccg

SEQ ID NO: 10358 - DNA, 25 bp, Artificial Sequence
  Synthetic Oligonucleotide
gtcactcttagatgtactcactcag

SEQ ID NO: 10359 - DNA, 25 bp, Artificial Sequence
  Synthetic Oligonucleotide
agaacctcaggatctcacactacag

SEQ ID NO: 10360 - DNA, 25 bp, Artificial Sequence
  Synthetic Oligonucleotide
aggagtaacctcaagacctccaagg

SEQ ID NO: 10361 - DNA, 25 bp, Artificial Sequence
  Synthetic Oligonucleotide
cacgaaaacccgacgccttggcgag

SEQ ID NO: 10362 - DNA, 25 bp, Artificial Sequence
  Synthetic Oligonucleotide
cgcgagcatcacaccctcatgggag

SEQ ID NO: 10363 - DNA, 25 bp, Artificial Sequence
  Synthetic Oligonucleotide
gaagtcattgcttctctcctgggag

SEQ ID NO: 10364 - DNA, 25 bp, Artificial Sequence
  Synthetic Oligonucleotide
atatttttgactgtctcctccggag

SEQ ID NO: 10365 - DNA, 25 bp, Artificial Sequence
  Synthetic Oligonucleotide
ttttcatgtcctgtctcttaccttg

SEQ ID NO: 10366 - DNA, 25 bp, Artificial Sequence
  Synthetic Oligonucleotide
ttcacagttctccgctcttccgtgg

SEQ ID NO: 10367 - DNA, 25 bp, Artificial Sequence
  Synthetic Oligonucleotide
ttttcacgttttctacaggtctgag

SEQ ID NO: 10368 - DNA, 25 bp, Artificial Sequence
  Synthetic Oligonucleotide
agtttaggtcttctacggcgtctcc

SEQ ID NO: 10369 - DNA, 25 bp, Artificial Sequence
  Synthetic Oligonucleotide
actgttaagacgtttgtagttttcc

SEQ ID NO: 10370 - DNA, 25 bp, Artificial Sequence
  Synthetic Oligonucleotide
cgttatggagactgtacgaatatcc

SEQ ID NO: 10371 - DNA, 25 bp, Artificial Sequence
  Synthetic Oligonucleotide
cacttaagacgatgtgttactatcc

SEQ ID NO: 10372 - DNA, 25 bp, Artificial Sequence
  Synthetic Oligonucleotide
cacttaagacgatgtgttactatcc

SEQ ID NO: 10373 - DNA, 25 bp, Artificial Sequence
  Synthetic Oligonucleotide
caacttccagagattgtactagacc

SEQ ID NO: 10374 - DNA, 25 bp, Artificial Sequence
  Synthetic Oligonucleotide
aaacggtacccagcttagtataacc

SEQ ID NO: 10375 - DNA, 25 bp, Artificial Sequence
  Synthetic Oligonucleotide
tagaggtgaaaccgtgacgtttacc

SEQ ID NO: 10376 - DNA, 25 bp, Artificial Sequence
  Synthetic Oligonucleotide
tggacgtcttattagggttactacc

SEQ ID NO: 10377 - DNA, 25 bp, Artificial Sequence
  Synthetic Oligonucleotide
acggtagcctactcgggtctaccct

SEQ ID NO: 10378 - DNA, 25 bp, Artificial Sequence
  Synthetic Oligonucleotide
cggtcgtgactataccggacctacc

SEQ ID NO: 10379 - DNA, 25 bp, Artificial Sequence
  Synthetic Oligonucleotide
caggtaacttacccggtacacaccg

SEQ ID NO: 10380 - DNA, 25 bp, Artificial Sequence
  Synthetic Oligonucleotide
ccgcgtcgaactacaagagcagccg

SEQ ID NO: 10381 - DNA, 25 bp, Artificial Sequence
  Synthetic Oligonucleotide
ctgtcgggatccacgtagcagtggt

SEQ ID NO: 10382 - DNA, 25 bp, Artificial Sequence
  Synthetic Oligonucleotide
ttaaggaatgccagtagctgtagtg

SEQ ID NO: 10383 - DNA, 25 bp, Artificial Sequence
  Synthetic Oligonucleotide
ctgaagcattgcgactgctactgcg

SEQ ID NO: 10384 - DNA, 25 bp, Artificial Sequence
  Synthetic Oligonucleotide
ctcgaactgattaggtatgttttcg

SEQ ID NO: 10385 - DNA, 25 bp, Artificial Sequence
  Synthetic Oligonucleotide
tcaataatactttgtagtttctcag

SEQ ID NO: 10386 - DNA, 25 bp, Artificial Sequence
  Synthetic Oligonucleotide
aaacactaccgtcgagatgtttcag

SEQ ID NO: 10387 - DNA, 25 bp, Artificial Sequence
  Synthetic Oligonucleotide
accaagtacgggaagtgtttgtacc

SEQ ID NO: 10388 - DNA, 25 bp, Artificial Sequence
  Synthetic Oligonucleotide
accaagtgtgggaagtgtttgtacc

SEQ ID NO: 10389 - DNA, 25 bp, Artificial Sequence
  Synthetic Oligonucleotide
accaagtgcgggaagtgtttgtacc

SEQ ID NO: 10390 - DNA, 25 bp, Artificial Sequence
  Synthetic Oligonucleotide
agcaaaagtaactcgattttttcag

SEQ ID NO: 10391 - DNA, 25 bp, Artificial Sequence
  Synthetic Oligonucleotide
tagaagtgcctgatctattttacag

SEQ ID NO: 10392 - DNA, 25 bp, Artificial Sequence
  Synthetic Oligonucleotide
tcggagtgctccacacatacataag

SEQ ID NO: 10393 - DNA, 25 bp, Artificial Sequence
  Synthetic Oligonucleotide
attcacgcacacgactactataacg

SEQ ID NO: 10394 - DNA, 25 bp, Artificial Sequence
  Synthetic Oligonucleotide
gggactactgacactaccgcctttg

SEQ ID NO: 10395 - DNA, 25 bp, Artificial Sequence
  Synthetic Oligonucleotide
ggcggatcttcgaaaacgccacctg

SEQ ID NO: 10396 - DNA, 25 bp, Artificial Sequence
  Synthetic Oligonucleotide
cgccggaacttcaattatcccttcg

SEQ ID NO: 10397 - DNA, 25 bp, Artificial Sequence
  Synthetic Oligonucleotide
ccggaattaaagaagtatcctgcgt

SEQ ID NO: 10398 - DNA, 25 bp, Artificial Sequence
  Synthetic Oligonucleotide
ataatatgtaaacgtatatctctcc

SEQ ID NO: 10399 - DNA, 25 bp, Artificial Sequence
  Synthetic Oligonucleotide
ctttgttaagacggagtatcctcct

SEQ ID NO: 10400 - DNA, 25 bp, Artificial Sequence
  Synthetic Oligonucleotide
tgttgtgacacatccgtatctccag

SEQ ID NO: 10401 - DNA, 25 bp, Artificial Sequence
  Synthetic Oligonucleotide
ttataagacttagtctatccgcgag

SEQ ID NO: 10402 - DNA, 25 bp, Artificial Sequence
  Synthetic Oligonucleotide
tttctatctcttaaccacgcctgcg

SEQ ID NO: 10403 - DNA, 25 bp, Artificial Sequence
  Synthetic Oligonucleotide
tgagtcgattctggtagctcccccg

SEQ ID NO: 10404 - DNA, 25 bp, Artificial Sequence
  Synthetic Oligonucleotide
gagtcacttatcagatatacccttg

SEQ ID NO: 10405 - DNA, 25 bp, Artificial Sequence
  Synthetic Oligonucleotide
tctactatgtctactaagctcttcg

SEQ ID NO: 10406 - DNA, 25 bp, Artificial Sequence
  Synthetic Oligonucleotide
tcgcgacttcttctagcgccgcgcg

SEQ ID NO: 10407 - DNA, 25 bp, Artificial Sequence
  Synthetic Oligonucleotide
cgcgactcgtgtctctccccgaccg

SEQ ID NO: 10408 - DNA, 25 bp, Artificial Sequence
  Synthetic Oligonucleotide
gacggagtcggacggctcatcgacc

SEQ ID NO: 10409 - DNA, 25 bp, Artificial Sequence
  Synthetic Oligonucleotide
acaggtctgagtggtacttggaccg

SEQ ID NO: 10410 - DNA, 25 bp, Artificial Sequence
  Synthetic Oligonucleotide
gacgagcgcagggcgtctttccgcg

SEQ ID NO: 10411 - DNA, 25 bp, Artificial Sequence
  Synthetic Oligonucleotide
aaatgaccatgtgagagttatcccg

SEQ ID NO: 10412 - DNA, 25 bp, Artificial Sequence
  Synthetic Oligonucleotide
ataaaggacttctgaagtagattcc

SEQ ID NO: 10413 - DNA, 25 bp, Artificial Sequence
  Synthetic Oligonucleotide
aataatcactatggaacgagatttg

SEQ ID NO: 10414 - DNA, 25 bp, Artificial Sequence
  Synthetic Oligonucleotide
taaaagggtaatggggataactctg

SEQ ID NO: 10415 - DNA, 25 bp, Artificial Sequence
  Synthetic Oligonucleotide
taaaaggttttgcgtgtgtaaggat

SEQ ID NO: 10416 - DNA, 25 bp, Artificial Sequence
  Synthetic Oligonucleotide
caaaaggtcttctctttgatagttt

SEQ ID NO: 10417 - DNA, 25 bp, Artificial Sequence
  Synthetic Oligonucleotide
acgacaatacttctttatcggattt

SEQ ID NO: 10418 - DNA, 25 bp, Artificial Sequence
  Synthetic Oligonucleotide
ggtaagatatcttgtttggtccttt

SEQ ID NO: 10419 - DNA, 25 bp, Artificial Sequence
  Synthetic Oligonucleotide
ttaaacgctcttaagttggccgttt

SEQ ID NO: 10420 - DNA, 25 bp, Artificial Sequence
  Synthetic Oligonucleotide
cgaactgagttgacgttggcggttt

SEQ ID NO: 10421 - DNA, 25 bp, Artificial Sequence
  Synthetic Oligonucleotide
agggctaagaggacgctggcaactt

SEQ ID NO: 10422 - DNA, 25 bp, Artificial Sequence
  Synthetic Oligonucleotide
gcgacacgaaggacaccggcacctg

SEQ ID NO: 10423 - DNA, 25 bp, Artificial Sequence
  Synthetic Oligonucleotide
gtacaaccggtcggaccagaacttg

SEQ ID NO: 10424 - DNA, 25 bp, Artificial Sequence
  Synthetic Oligonucleotide
gcgacgcggctacatcaactattcg

SEQ ID NO: 10425 - DNA, 25 bp, Artificial Sequence
  Synthetic Oligonucleotide
atcgagttacaatcaacgtaagtcg

SEQ ID NO: 10426 - DNA, 25 bp, Artificial Sequence
  Synthetic Oligonucleotide
acagtttcagactagactacagtag

SEQ ID NO: 10427 - DNA, 25 bp, Artificial Sequence
  Synthetic Oligonucleotide
aaacattcacatcatgtactcaacg

SEQ ID NO: 10428 - DNA, 25 bp, Artificial Sequence
  Synthetic Oligonucleotide
atatagtcgcttagtatacgtcaag

SEQ ID NO: 10429 - DNA, 25 bp, Artificial Sequence
  Synthetic Oligonucleotide
tcaagatcccttacgactcgatccg

SEQ ID NO: 10430 - DNA, 25 bp, Artificial Sequence
  Synthetic Oligonucleotide
ttcaaatccttttgtgtgtatctag

SEQ ID NO: 10431 - DNA, 25 bp, Artificial Sequence
  Synthetic Oligonucleotide
tcaaatcctttactgtgtatctagt

SEQ ID NO: 10432 - DNA, 25 bp, Artificial Sequence
  Synthetic Oligonucleotide
tacgaaaaccttaacgctgttcttg

SEQ ID NO: 10433 - DNA, 25 bp, Artificial Sequence
  Synthetic Oligonucleotide
attcaaaaggtcatcactttgatag

SEQ ID NO: 10434 - DNA, 25 bp, Artificial Sequence
  Synthetic Oligonucleotide
gacgaaatagtagtaacccataatg

SEQ ID NO: 10435 - DNA, 25 bp, Artificial Sequence
  Synthetic Oligonucleotide
agaccgagtatcgtcctctttcatg

SEQ ID NO: 10436 - DNA, 25 bp, Artificial Sequence
  Synthetic Oligonucleotide
gtgctacatctcctcacctttcaag

SEQ ID NO: 10437 - DNA, 25 bp, Artificial Sequence
  Synthetic Oligonucleotide
gtgccgctctgtggccgattcacag

SEQ ID NO: 10438 - DNA, 25 bp, Artificial Sequence
  Synthetic Oligonucleotide
tgtgctacgccgcggccctgtccag

SEQ ID NO: 10439 - DNA, 25 bp, Artificial Sequence
  Synthetic Oligonucleotide
cgtccgacggctggtgcccggtttg

SEQ ID NO: 10440 - DNA, 25 bp, Artificial Sequence
  Synthetic Oligonucleotide
gcccgacggttgacccggcgaaacg

SEQ ID NO: 10441 - DNA, 25 bp, Artificial Sequence
  Synthetic Oligonucleotide
cctgagaggtcttcccgtgccgaag

SEQ ID NO: 10442 - DNA, 25 bp, Artificial Sequence
  Synthetic Oligonucleotide
gttgaagcggaccttgccgacgtag

SEQ ID NO: 10443 - DNA, 25 bp, Artificial Sequence
  Synthetic Oligonucleotide
cgcgcttaagcgtcagttagctttg

SEQ ID NO: 10444 - DNA, 25 bp, Artificial Sequence
  Synthetic Oligonucleotide
gctcaaacgcggtcggtatttcgtg

SEQ ID NO: 10445 - DNA, 25 bp, Artificial Sequence
  Synthetic Oligonucleotide
gccaactagcggggcgtagattacc

SEQ ID NO: 10446 - DNA, 25 bp, Artificial Sequence
  Synthetic Oligonucleotide
gccaccactggggtgtgacttaccg

SEQ ID NO: 10447 - DNA, 25 bp, Artificial Sequence
  Synthetic Oligonucleotide
gtcgcctttgcgtgtcgtggttacc

SEQ ID NO: 10448 - DNA, 25 bp, Artificial Sequence
  Synthetic Oligonucleotide
cattcctcttggaccgtgagttccg

SEQ ID NO: 10449 - DNA, 25 bp, Artificial Sequence
  Synthetic Oligonucleotide
ttttcgtcgggagcactggtccgcg

SEQ ID NO: 10450 - DNA, 25 bp, Artificial Sequence
  Synthetic Oligonucleotide
tagtccgagggctacgagtgctacg

SEQ ID NO: 10451 - DNA, 25 bp, Artificial Sequence
  Synthetic Oligonucleotide
agtcggagcggcacgtagtagtacc

SEQ ID NO: 10452 - DNA, 25 bp, Artificial Sequence
  Synthetic Oligonucleotide
gagtcggcgctcctgtacctcgacc

SEQ ID NO: 10453 - DNA, 25 bp, Artificial Sequence
  Synthetic Oligonucleotide
gcgtgtcgagcaccctgacctcccg

SEQ ID NO: 10454 - DNA, 25 bp, Artificial Sequence
  Synthetic Oligonucleotide
ggtgttacgtcgtctccgccttacc

SEQ ID NO: 10455 - DNA, 25 bp, Artificial Sequence
  Synthetic Oligonucleotide
gtacctactgaatccgatctcctcg

SEQ ID NO: 10456 - DNA, 25 bp, Artificial Sequence
  Synthetic Oligonucleotide
gaactagaagtagcacgatcctcgg

SEQ ID NO: 10457 - DNA, 25 bp, Artificial Sequence
  Synthetic Oligonucleotide
agcatgactcgtgctaatggtaccg

SEQ ID NO: 10458 - DNA, 25 bp, Artificial Sequence
  Synthetic Oligonucleotide
ttcaagatctagctaactctgttcg

SEQ ID NO: 10459 - DNA, 25 bp, Artificial Sequence
  Synthetic Oligonucleotide
tcgggtagctgtcgctgttacgtcg

SEQ ID NO: 10460 - DNA, 25 bp, Artificial Sequence
  Synthetic Oligonucleotide
gtggagctacaggcgagtagtgtag

SEQ ID NO: 10461 - DNA, 25 bp, Artificial Sequence
  Synthetic Oligonucleotide
aaacgtgcagtcatggcgatgctcg

SEQ ID NO: 10462 - DNA, 25 bp, Artificial Sequence
  Synthetic Oligonucleotide
cagcagttctacgatggcaagtcct

SEQ ID NO: 10463 - DNA, 25 bp, Artificial Sequence
  Synthetic Oligonucleotide
aggacttgccatcgtagaactgctg

SEQ ID NO: 10464 - DNA, 25 bp, Artificial Sequence
  Synthetic Oligonucleotide
ataatttcattatgaatcgtcgtcg

SEQ ID NO: 10465 - DNA, 25 bp, Artificial Sequence
  Synthetic Oligonucleotide
ttagtttagccgttataatcgtccg

SEQ ID NO: 10466 - DNA, 25 bp, Artificial Sequence
  Synthetic Oligonucleotide
atataagttatcaaatagcttccgt

SEQ ID NO: 10467 - DNA, 25 bp, Artificial Sequence
  Synthetic Oligonucleotide
atcaagtactgttataaatgtaacc

SEQ ID NO: 10468 - DNA, 25 bp, Artificial Sequence
  Synthetic Oligonucleotide
atcagtacaagcaagacattatacc

SEQ ID NO: 10469 - DNA, 25 bp, Artificial Sequence
  Synthetic Oligonucleotide
tcagtacaagcaagacattatacct

SEQ ID NO: 10470 - DNA, 25 bp, Artificial Sequence
  Synthetic Oligonucleotide
tttacatcgacgacctggatttatt

SEQ ID NO: 10471 - DNA, 25 bp, Artificial Sequence
  Synthetic Oligonucleotide
gtaccgatgatttatggcgttcatt

SEQ ID NO: 10472 - DNA, 25 bp, Artificial Sequence
  Synthetic Oligonucleotide
agtaggagtgaaaaacgtggccatt

SEQ ID NO: 10473 - DNA, 25 bp, Artificial Sequence
  Synthetic Oligonucleotide
acaacgatcgtaaaagggttccatt

SEQ ID NO: 10474 - DNA, 25 bp, Artificial Sequence
  Synthetic Oligonucleotide
acaccactactataacggcattttg

SEQ ID NO: 10475 - DNA, 25 bp, Artificial Sequence
  Synthetic Oligonucleotide
gatccctaactttccgacagttttg

SEQ ID NO: 10476 - DNA, 25 bp, Artificial Sequence
  Synthetic Oligonucleotide
aagcctcccttagtcacagggtgtg

SEQ ID NO: 10477 - DNA, 25 bp, Artificial Sequence
  Synthetic Oligonucleotide
accgttaccgtttcccgaagaggtg

SEQ ID NO: 10478 - DNA, 25 bp, Artificial Sequence
  Synthetic Oligonucleotide
ccgttataatcgtccgtaaaggagt

SEQ ID NO: 10479 - DNA, 25 bp, Artificial Sequence
  Synthetic Oligonucleotide
gcgtgtattagcacagtaacggaag

SEQ ID NO: 10480 - DNA, 25 bp, Artificial Sequence
  Synthetic Oligonucleotide
agcggtaggtttaccgaaagttacg

SEQ ID NO: 10481 - DNA, 25 bp, Artificial Sequence
  Synthetic Oligonucleotide
agggagagtcgacaccaccacttcg

SEQ ID NO: 10482 - DNA, 25 bp, Artificial Sequence
  Synthetic Oligonucleotide
taagtgaatcgtgtcccatatatcg

SEQ ID NO: 10483 - DNA, 25 bp, Artificial Sequence
  Synthetic Oligonucleotide
atgggtattttagctctactaaacg

SEQ ID NO: 10484 - DNA, 25 bp, Artificial Sequence
  Synthetic Oligonucleotide
gcggcatttagttagctactcaacg

SEQ ID NO: 10485 - DNA, 25 bp, Artificial Sequence
  Synthetic Oligonucleotide
aggaattacgtgtcctacactcacg

SEQ ID NO: 10486 - DNA, 25 bp, Artificial Sequence
  Synthetic Oligonucleotide
aaagacattttgtccgtacctatag

SEQ ID NO: 10487 - DNA, 25 bp, Artificial Sequence
  Synthetic Oligonucleotide
ataagacatatgtgggcgtctcatg

SEQ ID NO: 10488 - DNA, 25 bp, Artificial Sequence
  Synthetic Oligonucleotide
gagaaattacagtgcgtgctaaagg

SEQ ID NO: 10489 - DNA, 25 bp, Artificial Sequence
  Synthetic Oligonucleotide
gggtttaagctgctagctaaacgtg

SEQ ID NO: 10490 - DNA, 25 bp, Artificial Sequence
  Synthetic Oligonucleotide
cgttttaaaccgcgctactaccgag

SEQ ID NO: 10491 - DNA, 25 bp, Artificial Sequence
  Synthetic Oligonucleotide
gatattcttgaagattcactacagg

SEQ ID NO: 10492 - DNA, 25 bp, Artificial Sequence
  Synthetic Oligonucleotide
ataaacgtgttctgggttgaccagg

SEQ ID NO: 10493 - DNA, 25 bp, Artificial Sequence
  Synthetic Oligonucleotide
ggattctagttctccgggacgaagg

SEQ ID NO: 10494 - DNA, 25 bp, Artificial Sequence
  Synthetic Oligonucleotide
gagtccgtgttcgtagcgggccatg

SEQ ID NO: 10495 - DNA, 25 bp, Artificial Sequence
  Synthetic Oligonucleotide
taccttttactcttcggtgctcccg

SEQ ID NO: 10496 - DNA, 25 bp, Artificial Sequence
  Synthetic Oligonucleotide
tatgtagtcacatcgcgcgcacccg

SEQ ID NO: 10497 - DNA, 25 bp, Artificial Sequence
  Synthetic Oligonucleotide
ggtcagtcacatcgcgcgcacgtcg

SEQ ID NO: 10498 - DNA, 25 bp, Artificial Sequence
  Synthetic Oligonucleotide
gacgtcaagtacttgcgacggcccg

SEQ ID NO: 10499 - DNA, 25 bp, Artificial Sequence
  Synthetic Oligonucleotide
aagtcgtcggtgttcggagagaacc

SEQ ID NO: 10500 - DNA, 25 bp, Artificial Sequence
  Synthetic Oligonucleotide
aaagagtcgttcacgttaggaatcg

SEQ ID NO: 10501 - DNA, 25 bp, Artificial Sequence
  Synthetic Oligonucleotide
aagaagtagatgtcgttcaaagtag

SEQ ID NO: 10502 - DNA, 25 bp, Artificial Sequence
  Synthetic Oligonucleotide
caaagctaactgtcgcttaagcgcg

SEQ ID NO: 10503 - DNA, 25 bp, Artificial Sequence
  Synthetic Oligonucleotide
gataaggaaccgttaccgtttcccg

SEQ ID NO: 10504 - DNA, 25 bp, Artificial Sequence
  Synthetic Oligonucleotide
tactggaaccgttcacctcgttccg

SEQ ID NO: 10505 - DNA, 25 bp, Artificial Sequence
  Synthetic Oligonucleotide
tcgcggtaaggctgacttagtttcg

SEQ ID NO: 10506 - DNA, 25 bp, Artificial Sequence
  Synthetic Oligonucleotide
ttcggccgaaagtggtccggtctcg

SEQ ID NO: 10507 - DNA, 25 bp, Artificial Sequence
  Synthetic Oligonucleotide
cgggcaccatgctggtctccgtatg

SEQ ID NO: 10508 - DNA, 25 bp, Artificial Sequence
  Synthetic Oligonucleotide
cgaagggcaagtcgagtccctactg

SEQ ID NO: 10509 - DNA, 25 bp, Artificial Sequence
  Synthetic Oligonucleotide
cggaattaaagtagtatcctgcgtg

SEQ ID NO: 10510 - DNA, 25 bp, Artificial Sequence
  Synthetic Oligonucleotide
gcaacttcaagcatcgctcttctcg

SEQ ID NO: 10511 - DNA, 25 bp, Artificial Sequence
  Synthetic Oligonucleotide
gcgagaatttaactaactctttctg

SEQ ID NO: 10512 - DNA, 25 bp, Artificial Sequence
  Synthetic Oligonucleotide
aaacgaataatacgaacctttcgtg

SEQ ID NO: 10513 - DNA, 25 bp, Artificial Sequence
  Synthetic Oligonucleotide
aacacaatagaactaccacttcgcg

SEQ ID NO: 10514 - DNA, 25 bp, Artificial Sequence
  Synthetic Oligonucleotide
ataaacctagtgtaaagaccttccg

SEQ ID NO: 10515 - DNA, 25 bp, Artificial Sequence
  Synthetic Oligonucleotide
taaaagtccggcaaagacttcacag

SEQ ID NO: 10516 - DNA, 25 bp, Artificial Sequence
  Synthetic Oligonucleotide
gaaatcgcaagtctcagacttgcag

SEQ ID NO: 10517 - DNA, 25 bp, Artificial Sequence
  Synthetic Oligonucleotide
atactatgccaccttccgtcttggg

SEQ ID NO: 10518 - DNA, 25 bp, Artificial Sequence
  Synthetic Oligonucleotide
aaatagtcctacctcaagtattggg

SEQ ID NO: 10519 - DNA, 25 bp, Artificial Sequence
  Synthetic Oligonucleotide
aattcactaaacttagacctagaag

SEQ ID NO: 10520 - DNA, 25 bp, Artificial Sequence
  Synthetic Oligonucleotide
ttttacaatatttcgacctcggtcg

SEQ ID NO: 10521 - DNA, 25 bp, Artificial Sequence
  Synthetic Oligonucleotide
tgttactccctttacttcgcgctcg

SEQ ID NO: 10522 - DNA, 25 bp, Artificial Sequence
  Synthetic Oligonucleotide
ttttcttcgaagttcttgacgaccg

SEQ ID NO: 10523 - DNA, 25 bp, Artificial Sequence
  Synthetic Oligonucleotide
cttttgtggaagtagttcacacgcg

SEQ ID NO: 10524 - DNA, 25 bp, Artificial Sequence
  Synthetic Oligonucleotide
agtttgggtcgacgacttcctaccg

SEQ ID NO: 10525 - DNA, 25 bp, Artificial Sequence
  Synthetic Oligonucleotide
caggtagttgccagaaaacccaccg

SEQ ID NO: 10526 - DNA, 25 bp, Artificial Sequence
  Synthetic Oligonucleotide
caggcagttgtcagaaaacccaccg

SEQ ID NO: 10527 - DNA, 25 bp, Artificial Sequence
  Synthetic Oligonucleotide
gctattgactaaattactcggtaag

SEQ ID NO: 10528 - DNA, 25 bp, Artificial Sequence
  Synthetic Oligonucleotide
tgtttcaacagtaactctcgttacg

SEQ ID NO: 10529 - DNA, 25 bp, Artificial Sequence
  Synthetic Oligonucleotide
tgctcctagctttacgaccgctacg

SEQ ID NO: 10530 - DNA, 25 bp, Artificial Sequence
  Synthetic Oligonucleotide
ctatagtagtcgctatacaccatcg

SEQ ID NO: 10531 - DNA, 25 bp, Artificial Sequence
  Synthetic Oligonucleotide
cgtactattatatcaacaccatcgt

SEQ ID NO: 10532 - DNA, 25 bp, Artificial Sequence
  Synthetic Oligonucleotide
gactgagtagtagcttaaccgtgag

SEQ ID NO: 10533 - DNA, 25 bp, Artificial Sequence
  Synthetic Oligonucleotide
aggctctagtctgctctagcccgcg

SEQ ID NO: 10534 - DNA, 25 bp, Artificial Sequence
  Synthetic Oligonucleotide
gaaggctctagtctgctctagcccg

SEQ ID NO: 10535 - DNA, 25 bp, Artificial Sequence
  Synthetic Oligonucleotide
aacggtcaacgtcgttattaggccg

SEQ ID NO: 10536 - DNA, 25 bp, Artificial Sequence
  Synthetic Oligonucleotide
taacgtccacggctttaagtcggcg

SEQ ID NO: 10537 - DNA, 25 bp, Artificial Sequence
  Synthetic Oligonucleotide
ctcctcaactcgttgttaatccgtg

SEQ ID NO: 10538 - DNA, 25 bp, Artificial Sequence
  Synthetic Oligonucleotide
cacctgagttgctgtatcagccgag

SEQ ID NO: 10539 - DNA, 25 bp, Artificial Sequence
  Synthetic Oligonucleotide
ttacactcatttaaaacagctcgag

SEQ ID NO: 10540 - DNA, 25 bp, Artificial Sequence
  Synthetic Oligonucleotide
aacttacatttttaacgtcatctgt

SEQ ID NO: 10541 - DNA, 25 bp, Artificial Sequence
  Synthetic Oligonucleotide
cgaaggtcattttgtagccagatgt

SEQ ID NO: 10542 - DNA, 25 bp, Artificial Sequence
  Synthetic Oligonucleotide
acccaggcattatatcgggtttagt

SEQ ID NO: 10543 - DNA, 25 bp, Artificial Sequence
  Synthetic Oligonucleotide
cgcagacctgttgtaccgatgattt

SEQ ID NO: 10544 - DNA, 25 bp, Artificial Sequence
  Synthetic Oligonucleotide
tgaatcatttagcatgaggacttct

SEQ ID NO: 10545 - DNA, 25 bp, Artificial Sequence
  Synthetic Oligonucleotide
acatgctttagtcacggaaacttgt

SEQ ID NO: 10546 - DNA, 25 bp, Artificial Sequence
  Synthetic Oligonucleotide
ttacatgctttagtcacggaaactt

SEQ ID NO: 10547 - DNA, 25 bp, Artificial Sequence
  Synthetic Oligonucleotide
acgaagaatcgaatccggaaactgt

SEQ ID NO: 10548 - DNA, 25 bp, Artificial Sequence
  Synthetic Oligonucleotide
gacgaagaatcgaatccggaaactg

SEQ ID NO: 10549 - DNA, 25 bp, Artificial Sequence
  Synthetic Oligonucleotide
ggaagaacaggtgtcgaaactactg

SEQ ID NO: 10550 - DNA, 25 bp, Artificial Sequence
  Synthetic Oligonucleotide
gccgaccaaggtgacgaacacagtg

SEQ ID NO: 10551 - DNA, 25 bp, Artificial Sequence
  Synthetic Oligonucleotide
gtaccgacgtagtccgaacgcgggt

SEQ ID NO: 10552 - DNA, 25 bp, Artificial Sequence
  Synthetic Oligonucleotide
ccgacgaccgtggtctgaacgggag

SEQ ID NO: 10553 - DNA, 25 bp, Artificial Sequence
  Synthetic Oligonucleotide
tccacggcagctagtacgcgtaaag

SEQ ID NO: 10554 - DNA, 25 bp, Artificial Sequence
  Synthetic Oligonucleotide
ccatgagtgagttggactataatcg

SEQ ID NO: 10555 - DNA, 25 bp, Artificial Sequence
  Synthetic Oligonucleotide
cctaccgaggcgtatcgatcaatcg

SEQ ID NO: 10556 - DNA, 25 bp, Artificial Sequence
  Synthetic Oligonucleotide
cctaccgaggcgtatcgatcaatcg

SEQ ID NO: 10557 - DNA, 25 bp, Artificial Sequence
  Synthetic Oligonucleotide
tccgtaaaggagttaacaacacacc

SEQ ID NO: 10558 - DNA, 25 bp, Artificial Sequence
  Synthetic Oligonucleotide
gtgccaatcggaaacctaactcacc

SEQ ID NO: 10559 - DNA, 25 bp, Artificial Sequence
  Synthetic Oligonucleotide
aatggaagtcattctacgtactacg

SEQ ID NO: 10560 - DNA, 25 bp, Artificial Sequence
  Synthetic Oligonucleotide
gaaaatgtataagttcctacgacag

SEQ ID NO: 10561 - DNA, 25 bp, Artificial Sequence
  Synthetic Oligonucleotide
ggagaagtgagacctttcatcaacg

SEQ ID NO: 10562 - DNA, 25 bp, Artificial Sequence
  Synthetic Oligonucleotide
gacgaacggccgtttttactcggcg

SEQ ID NO: 10563 - DNA, 25 bp, Artificial Sequence
  Synthetic Oligonucleotide
gtcgggacgtctttatttgcggacg

SEQ ID NO: 10564 - DNA, 25 bp, Artificial Sequence
  Synthetic Oligonucleotide
tatggcgcgcggtcatttagtcacc

SEQ ID NO: 10565 - DNA, 25 bp, Artificial Sequence
  Synthetic Oligonucleotide
ggacgtaccggggaccttagttatg

SEQ ID NO: 10566 - DNA, 25 bp, Artificial Sequence
  Synthetic Oligonucleotide
aaagacgttcggtcccctagagagg

SEQ ID NO: 10567 - DNA, 25 bp, Artificial Sequence
  Synthetic Oligonucleotide
gagcagcgggtgtatccttaggaag

SEQ ID NO: 10568 - DNA, 25 bp, Artificial Sequence
  Synthetic Oligonucleotide
gagcagtgggtgtatcctcaggaag

SEQ ID NO: 10569 - DNA, 25 bp, Artificial Sequence
  Synthetic Oligonucleotide
agtcgctgcggtgttcctgcggaat

SEQ ID NO: 10570 - DNA, 25 bp, Artificial Sequence
  Synthetic Oligonucleotide
ctcgctcgctggtttccttggtatt

SEQ ID NO: 10571 - DNA, 25 bp, Artificial Sequence
  Synthetic Oligonucleotide
tgtcctccttagatgcctggaactt

SEQ ID NO: 10572 - DNA, 25 bp, Artificial Sequence
  Synthetic Oligonucleotide
ttccgaccttttctcggagtcccgt

SEQ ID NO: 10573 - DNA, 25 bp, Artificial Sequence
  Synthetic Oligonucleotide
gtctcgactcctggcttgggtcccg

SEQ ID NO: 10574 - DNA, 25 bp, Artificial Sequence
  Synthetic Oligonucleotide
gtcgtgctcctcgcagcagtggccg

SEQ ID NO: 10575 - DNA, 25 bp, Artificial Sequence
  Synthetic Oligonucleotide
gcggtcttgtctgaaactagggccg

SEQ ID NO: 10576 - DNA, 25 bp, Artificial Sequence
  Synthetic Oligonucleotide
cttcttctgtctaccaagacgtccg

SEQ ID NO: 10577 - DNA, 25 bp, Artificial Sequence
  Synthetic Oligonucleotide
cacctgaggtgctgtatgagtcgcg

SEQ ID NO: 10578 - DNA, 25 bp, Artificial Sequence
  Synthetic Oligonucleotide
gctaccgcggtggtagattgacgcg

SEQ ID NO: 10579 - DNA, 25 bp, Artificial Sequence
  Synthetic Oligonucleotide
gggctcatcgaccctaatgtccgcg

SEQ ID NO: 10580 - DNA, 25 bp, Artificial Sequence
  Synthetic Oligonucleotide
gagggctcatcgaccctaatgtccg

SEQ ID NO: 10581 - DNA, 25 bp, Artificial Sequence
  Synthetic Oligonucleotide
gagggtttcacgaccctaatgtccg

SEQ ID NO: 10582 - DNA, 25 bp, Artificial Sequence
  Synthetic Oligonucleotide
agtagtctgcaaccacttacttccg

SEQ ID NO: 10583 - DNA, 25 bp, Artificial Sequence
  Synthetic Oligonucleotide
aacggtctgaagtaccatcggcacg

SEQ ID NO: 10584 - DNA, 25 bp, Artificial Sequence
  Synthetic Oligonucleotide
ggctccaatagatctcagtggttcg

SEQ ID NO: 10585 - DNA, 25 bp, Artificial Sequence
  Synthetic Oligonucleotide
actccggtcctatctcggtggttag

SEQ ID NO: 10586 - DNA, 25 bp, Artificial Sequence
  Synthetic Oligonucleotide
acgttcggtcccctagagagggtcg

SEQ ID NO: 10587 - DNA, 25 bp, Artificial Sequence
  Synthetic Oligonucleotide
tcgctcgtggtctttgcgtggctcg

SEQ ID NO: 10588 - DNA, 25 bp, Artificial Sequence
  Synthetic Oligonucleotide
aggacttgccatcgtagaactgctg

SEQ ID NO: 10589 - DNA, 25 bp, Artificial Sequence
  Synthetic Oligonucleotide
cagcagttctacgatggcaagtcct

SEQ ID NO: 10590 - DNA, 25 bp, Artificial Sequence
  Synthetic Oligonucleotide
ataatttcattaagaatcgtcgtcg

SEQ ID NO: 10591 - DNA, 25 bp, Artificial Sequence
  Synthetic Oligonucleotide
ttagtttagccgatataatcgtccg

SEQ ID NO: 10592 - DNA, 25 bp, Artificial Sequence
  Synthetic Oligonucleotide
atataagttatctaatagcttccgt

SEQ ID NO: 10593 - DNA, 25 bp, Artificial Sequence
  Synthetic Oligonucleotide
atcaagtactgtaataaatgtaacc

SEQ ID NO: 10594 - DNA, 25 bp, Artificial Sequence
  Synthetic Oligonucleotide
atcagtacaagctagacattatacc

SEQ ID NO: 10595 - DNA, 25 bp, Artificial Sequence
  Synthetic Oligonucleotide
tcagtacaagcatgacattatacct

SEQ ID NO: 10596 - DNA, 25 bp, Artificial Sequence
  Synthetic Oligonucleotide
tttacatcgacgtcctggatttatt

SEQ ID NO: 10597 - DNA, 25 bp, Artificial Sequence
  Synthetic Oligonucleotide
gtaccgatgattaatggcgttcatt

SEQ ID NO: 10598 - DNA, 25 bp, Artificial Sequence
  Synthetic Oligonucleotide
agtaggagtgaataacgtggccatt

SEQ ID NO: 10599 - DNA, 25 bp, Artificial Sequence
  Synthetic Oligonucleotide
acaacgatcgtataagggttccatt

SEQ ID NO: 10600 - DNA, 25 bp, Artificial Sequence
  Synthetic Oligonucleotide
acaccactactaaaacggcattttg

SEQ ID NO: 10601 - DNA, 25 bp, Artificial Sequence
  Synthetic Oligonucleotide
gatccctaacttaccgacagttttg

SEQ ID NO: 10602 - DNA, 25 bp, Artificial Sequence
  Synthetic Oligonucleotide
aagcctcccttactcacagggtgtg

SEQ ID NO: 10603 - DNA, 25 bp, Artificial Sequence
  Synthetic Oligonucleotide
accgttaccgttacccgaagaggtg

SEQ ID NO: 10604 - DNA, 25 bp, Artificial Sequence
  Synthetic Oligonucleotide
ccgttataatcgaccgtaaaggagt

SEQ ID NO: 10605 - DNA, 25 bp, Artificial Sequence
  Synthetic Oligonucleotide
gcgtgtattagctcagtaacggaag

SEQ ID NO: 10606 - DNA, 25 bp, Artificial Sequence
  Synthetic Oligonucleotide
agcggtaggttttccgaaagttacg

SEQ ID NO: 10607 - DNA, 25 bp, Artificial Sequence
  Synthetic Oligonucleotide
agggagagtcgagaccaccacttcg

SEQ ID NO: 10608 - DNA, 25 bp, Artificial Sequence
  Synthetic Oligonucleotide
taagtgaatcgtctcccatatatcg

SEQ ID NO: 10609 - DNA, 25 bp, Artificial Sequence
  Synthetic Oligonucleotide
atgggtattttacctctactaaacg

SEQ ID NO: 10610 - DNA, 25 bp, Artificial Sequence
  Synthetic Oligonucleotide
gcggcatttagtaagctactcaacg

SEQ ID NO: 10611 - DNA, 25 bp, Artificial Sequence
  Synthetic Oligonucleotide
aggaattacgtgacctacactcacg

SEQ ID NO: 10612 - DNA, 25 bp, Artificial Sequence
  Synthetic Oligonucleotide
aaagacattttgaccgtacctatag

SEQ ID NO: 10613 - DNA, 25 bp, Artificial Sequence
  Synthetic Oligonucleotide
ataagacatatgagggcgtctcatg

SEQ ID NO: 10614 - DNA, 25 bp, Artificial Sequence
  Synthetic Oligonucleotide
gagaaattacagagcgtgctaaagg

SEQ ID NO: 10615 - DNA, 25 bp, Artificial Sequence
  Synthetic Oligonucleotide
gggtttaagctggtagctaaacgtg

SEQ ID NO: 10616 - DNA, 25 bp, Artificial Sequence
  Synthetic Oligonucleotide
cgttttaaaccgggctactaccgag

SEQ ID NO: 10617 - DNA, 25 bp, Artificial Sequence
  Synthetic Oligonucleotide
gatattcttgaacattcactacagg

SEQ ID NO: 10618 - DNA, 25 bp, Artificial Sequence
  Synthetic Oligonucleotide
ataaacgtgttcagggttgaccagg

SEQ ID NO: 10619 - DNA, 25 bp, Artificial Sequence
  Synthetic Oligonucleotide
ggattctagttcaccgggacgaagg

SEQ ID NO: 10620 - DNA, 25 bp, Artificial Sequence
  Synthetic Oligonucleotide
gagtccgtgttcctagcgggccatg

SEQ ID NO: 10621 - DNA, 25 bp, Artificial Sequence
  Synthetic Oligonucleotide
taccttttactcatcggtgctcccg

SEQ ID NO: 10622 - DNA, 25 bp, Artificial Sequence
  Synthetic Oligonucleotide
tatgtagtcacaacgcgcgcacccg

SEQ ID NO: 10623 - DNA, 25 bp, Artificial Sequence
  Synthetic Oligonucleotide
ggtcagtcacatggcgcgcacgtcg

SEQ ID NO: 10624 - DNA, 25 bp, Artificial Sequence
  Synthetic Oligonucleotide
gacgtcaagtacatgcgacggcccg

SEQ ID NO: 10625 - DNA, 25 bp, Artificial Sequence
  Synthetic Oligonucleotide
aagtcgtcggtgatcggagagaacc

SEQ ID NO: 10626 - DNA, 25 bp, Artificial Sequence
  Synthetic Oligonucleotide
aaagagtcgttctcgttaggaatcg

SEQ ID NO: 10627 - DNA, 25 bp, Artificial Sequence
  Synthetic Oligonucleotide
aagaagtagatgacgttcaaagtag

SEQ ID NO: 10628 - DNA, 25 bp, Artificial Sequence
  Synthetic Oligonucleotide
caaagctaactgacgcttaagcgcg

SEQ ID NO: 10629 - DNA, 25 bp, Artificial Sequence
  Synthetic Oligonucleotide
gataaggaaccgataccgtttcccg

SEQ ID NO: 10630 - DNA, 25 bp, Artificial Sequence
  Synthetic Oligonucleotide
tactggaaccgtacacctcgttccg

SEQ ID NO: 10631 - DNA, 25 bp, Artificial Sequence
  Synthetic Oligonucleotide
tcgcggtaaggcagacttagtttcg

SEQ ID NO: 10632 - DNA, 25 bp, Artificial Sequence
  Synthetic Oligonucleotide
ttcggccgaaagaggtccggtctcg

SEQ ID NO: 10633 - DNA, 25 bp, Artificial Sequence
  Synthetic Oligonucleotide
cgggcaccatgcaggtctccgtatg

SEQ ID NO: 10634 - DNA, 25 bp, Artificial Sequence
  Synthetic Oligonucleotide
cgaagggcaagtggagtccctactg

SEQ ID NO: 10635 - DNA, 25 bp, Artificial Sequence
  Synthetic Oligonucleotide
cggaattaaagttgtatcctgcgtg

SEQ ID NO: 10636 - DNA, 25 bp, Artificial Sequence
  Synthetic Oligonucleotide
gcaacttcaagcttcgctcttctcg

SEQ ID NO: 10637 - DNA, 25 bp, Artificial Sequence
  Synthetic Oligonucleotide
gcgagaatttaagtaactctttctg

SEQ ID NO: 10638 - DNA, 25 bp, Artificial Sequence
  Synthetic Oligonucleotide
aaacgaataataggaacctttcgtg

SEQ ID NO: 10639 - DNA, 25 bp, Artificial Sequence
  Synthetic Oligonucleotide
aacacaatagaagtaccacttcgcg

SEQ ID NO: 10640 - DNA, 25 bp, Artificial Sequence
  Synthetic Oligonucleotide
ataaacctagtgaaaagaccttccg

SEQ ID NO: 10641 - DNA, 25 bp, Artificial Sequence
  Synthetic Oligonucleotide
taaaagtccggctaagacttcacag

SEQ ID NO: 10642 - DNA, 25 bp, Artificial Sequence
  Synthetic Oligonucleotide
gaaatcgcaagtgtcagacttgcag

SEQ ID NO: 10643 - DNA, 25 bp, Artificial Sequence
  Synthetic Oligonucleotide
atactatgccacgttccgtcttggg

SEQ ID NO: 10644 - DNA, 25 bp, Artificial Sequence
  Synthetic Oligonucleotide
aaatagtcctacgtcaagtattggg

SEQ ID NO: 10645 - DNA, 25 bp, Artificial Sequence
  Synthetic Oligonucleotide
aattcactaaacatagacctagaag

SEQ ID NO: 10646 - DNA, 25 bp, Artificial Sequence
  Synthetic Oligonucleotide
ttttacaatattacgacctcggtcg

SEQ ID NO: 10647 - DNA, 25 bp, Artificial Sequence
  Synthetic Oligonucleotide
tgttactcccttaacttcgcgctcg

SEQ ID NO: 10648 - DNA, 25 bp, Artificial Sequence
  Synthetic Oligonucleotide
ttttcttcgaagatcttgacgaccg

SEQ ID NO: 10649 - DNA, 25 bp, Artificial Sequence
  Synthetic Oligonucleotide
cttttgtggaagaagttcacacgcg

SEQ ID NO: 10650 - DNA, 25 bp, Artificial Sequence
  Synthetic Oligonucleotide
agtttgggtcgaggacttcctaccg

SEQ ID NO: 10651 - DNA, 25 bp, Artificial Sequence
  Synthetic Oligonucleotide
caggtagttgcctgaaaacccaccg

SEQ ID NO: 10652 - DNA, 25 bp, Artificial Sequence
  Synthetic Oligonucleotide
caggcagttgtctgaaaacccaccg

SEQ ID NO: 10653 - DNA, 25 bp, Artificial Sequence
  Synthetic Oligonucleotide
gctattgactaatttactcggtaag

SEQ ID NO: 10654 - DNA, 25 bp, Artificial Sequence
  Synthetic Oligonucleotide
tgtttcaacagttactctcgttacg

SEQ ID NO: 10655 - DNA, 25 bp, Artificial Sequence
  Synthetic Oligonucleotide
tgctcctagcttaacgaccgctacg

SEQ ID NO: 10656 - DNA, 25 bp, Artificial Sequence
  Synthetic Oligonucleotide
ctatagtagtcggtatacaccatcg

SEQ ID NO: 10657 - DNA, 25 bp, Artificial Sequence
  Synthetic Oligonucleotide
cgtactattataacaacaccatcgt

SEQ ID NO: 10658 - DNA, 25 bp, Artificial Sequence
  Synthetic Oligonucleotide
gactgagtagtaccttaaccgtgag

SEQ ID NO: 10659 - DNA, 25 bp, Artificial Sequence
  Synthetic Oligonucleotide
aggctctagtctcctctagcccgcg

SEQ ID NO: 10660 - DNA, 25 bp, Artificial Sequence
  Synthetic Oligonucleotide
gaaggctctagtgtgctctagcccg

SEQ ID NO: 10661 - DNA, 25 bp, Artificial Sequence
  Synthetic Oligonucleotide
aacggtcaacgtggttattaggccg

SEQ ID NO: 10662 - DNA, 25 bp, Artificial Sequence
  Synthetic Oligonucleotide
taacgtccacgggtttaagtcggcg

SEQ ID NO: 10663 - DNA, 25 bp, Artificial Sequence
  Synthetic Oligonucleotide
ctcctcaactcgatgttaatccgtg

SEQ ID NO: 10664 - DNA, 25 bp, Artificial Sequence
  Synthetic Oligonucleotide
cacctgagttgcagtatcagccgag

SEQ ID NO: 10665 - DNA, 25 bp, Artificial Sequence
  Synthetic Oligonucleotide
ttacactcattttaaacagctcgag

SEQ ID NO: 10666 - DNA, 25 bp, Artificial Sequence
  Synthetic Oligonucleotide
aacttacattttaaacgtcatctgt

SEQ ID NO: 10667 - DNA, 25 bp, Artificial Sequence
  Synthetic Oligonucleotide
cgaaggtcatttagtagccagatgt

SEQ ID NO: 10668 - DNA, 25 bp, Artificial Sequence
  Synthetic Oligonucleotide
acccaggcattaaatcgggtttagt

SEQ ID NO: 10669 - DNA, 25 bp, Artificial Sequence
  Synthetic Oligonucleotide
cgcagacctgttctaccgatgattt

SEQ ID NO: 10670 - DNA, 25 bp, Artificial Sequence
  Synthetic Oligonucleotide
tgaatcatttaggatgaggacttct

SEQ ID NO: 10671 - DNA, 25 bp, Artificial Sequence
  Synthetic Oligonucleotide
acatgctttagtgacggaaacttgt

SEQ ID NO: 10672 - DNA, 25 bp, Artificial Sequence
  Synthetic Oligonucleotide
ttacatgctttactcacggaaactt

SEQ ID NO: 10673 - DNA, 25 bp, Artificial Sequence
  Synthetic Oligonucleotide
acgaagaatcgattccggaaactgt

SEQ ID NO: 10674 - DNA, 25 bp, Artificial Sequence
  Synthetic Oligonucleotide
gacgaagaatcgtatccggaaactg

SEQ ID NO: 10675 - DNA, 25 bp, Artificial Sequence
  Synthetic Oligonucleotide
ggaagaacaggtctcgaaactactg

SEQ ID NO: 10676 - DNA, 25 bp, Artificial Sequence
  Synthetic Oligonucleotide
gccgaccaaggtcacgaacacagtg

SEQ ID NO: 10677 - DNA, 25 bp, Artificial Sequence
  Synthetic Oligonucleotide
gtaccgacgtagaccgaacgcgggt

SEQ ID NO: 10678 - DNA, 25 bp, Artificial Sequence
  Synthetic Oligonucleotide
ccgacgaccgtgctctgaacgggag

SEQ ID NO: 10679 - DNA, 25 bp, Artificial Sequence
  Synthetic Oligonucleotide
tccacggcagcttgtacgcgtaaag

SEQ ID NO: 10680 - DNA, 25 bp, Artificial Sequence
  Synthetic Oligonucleotide
ccatgagtgagtaggactataatcg

SEQ ID NO: 10681 - DNA, 25 bp, Artificial Sequence
  Synthetic Oligonucleotide
cctaccgaggcgaatcgatcaatcg

SEQ ID NO: 10682 - DNA, 25 bp, Artificial Sequence
  Synthetic Oligonucleotide
cctaccgaggcgaatcgatcaatcg

SEQ ID NO: 10683 - DNA, 25 bp, Artificial Sequence
  Synthetic Oligonucleotide
tccgtaaaggagataacaacacacc

SEQ ID NO: 10684 - DNA, 25 bp, Artificial Sequence
  Synthetic Oligonucleotide
gtgccaatcggatacctaactcacc

SEQ ID NO: 10685 - DNA, 25 bp, Artificial Sequence
  Synthetic Oligonucleotide
aatggaagtcatactacgtactacg

SEQ ID NO: 10686 - DNA, 25 bp, Artificial Sequence
  Synthetic Oligonucleotide
gaaaatgtataacttcctacgacag

SEQ ID NO: 10687 - DNA, 25 bp, Artificial Sequence
  Synthetic Oligonucleotide
ggagaagtgagagctttcatcaacg

SEQ ID NO: 10688 - DNA, 25 bp, Artificial Sequence
  Synthetic Oligonucleotide
gacgaacggccgattttactcggcg

SEQ ID NO: 10689 - DNA, 25 bp, Artificial Sequence
  Synthetic Oligonucleotide
gtcgggacgtctatatttgcggacg

SEQ ID NO: 10690 - DNA, 25 bp, Artificial Sequence
  Synthetic Oligonucleotide
tatggcgcgcggacatttagtcacc

SEQ ID NO: 10691 - DNA, 25 bp, Artificial Sequence
  Synthetic Oligonucleotide
ggacgtaccgggcaccttagttatg

SEQ ID NO: 10692 - DNA, 25 bp, Artificial Sequence
  Synthetic Oligonucleotide
aaagacgttcggacccctagagagg

SEQ ID NO: 10693 - DNA, 25 bp, Artificial Sequence
  Synthetic Oligonucleotide
gagcagcgggtgaatccttaggaag

SEQ ID NO: 10694 - DNA, 25 bp, Artificial Sequence
  Synthetic Oligonucleotide
gagcagtgggtgaatcctcaggaag

SEQ ID NO: 10695 - DNA, 25 bp, Artificial Sequence
  Synthetic Oligonucleotide
agtcgctgcggtcttcctgcggaat

SEQ ID NO: 10696 - DNA, 25 bp, Artificial Sequence
  Synthetic Oligonucleotide
ctcgctcgctggattccttggtatt

SEQ ID NO: 10697 - DNA, 25 bp, Artificial Sequence
  Synthetic Oligonucleotide
tgtcctccttagttgcctggaactt

SEQ ID NO: 10698 - DNA, 25 bp, Artificial Sequence
  Synthetic Oligonucleotide
ttccgaccttttgtcggagtcccgt

SEQ ID NO: 10699 - DNA, 25 bp, Artificial Sequence
  Synthetic Oligonucleotide
gtctcgactcctcgcttgggtcccg

SEQ ID NO: 10700 - DNA, 25 bp, Artificial Sequence
  Synthetic Oligonucleotide
gtcgtgctcctcccagcagtggccg

SEQ ID NO: 10701 - DNA, 25 bp, Artificial Sequence
  Synthetic Oligonucleotide
gcggtcttgtctcaaactagggccg

SEQ ID NO: 10702 - DNA, 25 bp, Artificial Sequence
  Synthetic Oligonucleotide
cttcttctgtcttccaagacgtccg

SEQ ID NO: 10703 - DNA, 25 bp, Artificial Sequence
  Synthetic Oligonucleotide
cacctgaggtgcagtatgagtcgcg

SEQ ID NO: 10704 - DNA, 25 bp, Artificial Sequence
  Synthetic Oligonucleotide
gctaccgcggtgctagattgacgcg

SEQ ID NO: 10705 - DNA, 25 bp, Artificial Sequence
  Synthetic Oligonucleotide
gggctcatcgacgctaatgtccgcg

SEQ ID NO: 10706 - DNA, 25 bp, Artificial Sequence
  Synthetic Oligonucleotide
gagggctcatcgtccctaatgtccg

SEQ ID NO: 10707 - DNA, 25 bp, Artificial Sequence
  Synthetic Oligonucleotide
gagggtttcacgtccctaatgtccg

SEQ ID NO: 10708 - DNA, 25 bp, Artificial Sequence
  Synthetic Oligonucleotide
agtagtctgcaagcacttacttccg

SEQ ID NO: 10709 - DNA, 25 bp, Artificial Sequence
  Synthetic Oligonucleotide
aacggtctgaagaaccatcggcacg

SEQ ID NO: 10710 - DNA, 25 bp, Artificial Sequence
  Synthetic Oligonucleotide
ggctccaatagaactcagtggttcg

SEQ ID NO: 10711 - DNA, 25 bp, Artificial Sequence
  Synthetic Oligonucleotide
actccggtcctaactcggtggttag

SEQ ID NO: 10712 - DNA, 25 bp, Artificial Sequence
  Synthetic Oligonucleotide
acgttcggtcccgtagagagggtcg

SEQ ID NO: 10713 - DNA, 25 bp, Artificial Sequence
  Synthetic Oligonucleotide
tcgctcgtggtcattgcgtggctcg

SEQ ID NO: 10714 - DNA, 25 bp, Artificial Sequence
  Synthetic Oligonucleotide
cagcagttctacgatggcaagtcct

SEQ ID NO: 10715 - DNA, 25 bp, Artificial Sequence
  Synthetic Oligonucleotide
aggacttgccatcgtagaactgctg

SEQ ID NO: 10716 - DNA, 25 bp, Artificial Sequence
  Synthetic Oligonucleotide
cgaactgtttcaccagtaactcccg

SEQ ID NO: 10717 - DNA, 25 bp, Artificial Sequence
  Synthetic Oligonucleotide
gtgaatcgtgtcccatatatcgaag

SEQ ID NO: 10718 - DNA, 25 bp, Artificial Sequence
  Synthetic Oligonucleotide
aataaatctgtgacatcgacagaag

SEQ ID NO: 10719 - DNA, 25 bp, Artificial Sequence
  Synthetic Oligonucleotide
tatataaactcagagcaagcaatag

SEQ ID NO: 10720 - DNA, 25 bp, Artificial Sequence
  Synthetic Oligonucleotide
aaaggaactacagtgcctgttaaag

SEQ ID NO: 10721 - DNA, 25 bp, Artificial Sequence
  Synthetic Oligonucleotide
atgactatctgtcacagtgtaaacg

SEQ ID NO: 10722 - DNA, 25 bp, Artificial Sequence
  Synthetic Oligonucleotide
tctaggacatctctggtgtagtagg

SEQ ID NO: 10723 - DNA, 25 bp, Artificial Sequence
  Synthetic Oligonucleotide
agtcacggaaacttgtgacttgatg

SEQ ID NO: 10724 - DNA, 25 bp, Artificial Sequence
  Synthetic Oligonucleotide
aagtggtgatagtggtcactgcttg

SEQ ID NO: 10725 - DNA, 25 bp, Artificial Sequence
  Synthetic Oligonucleotide
aagtggtagagtcttcctatcaatt

SEQ ID NO: 10726 - DNA, 25 bp, Artificial Sequence
  Synthetic Oligonucleotide
agtcgaagagtgggtcccttaagtt

SEQ ID NO: 10727 - DNA, 25 bp, Artificial Sequence
  Synthetic Oligonucleotide
gggtcatgagtgacatcagtttgtg

SEQ ID NO: 10728 - DNA, 25 bp, Artificial Sequence
  Synthetic Oligonucleotide
ggtacatctggtactccaggtggtg

SEQ ID NO: 10729 - DNA, 25 bp, Artificial Sequence
  Synthetic Oligonucleotide
aggcgagactctacctcaacggggg

SEQ ID NO: 10730 - DNA, 25 bp, Artificial Sequence
  Synthetic Oligonucleotide
aagcggaccttcaccacgctggtcg

SEQ ID NO: 10731 - DNA, 25 bp, Artificial Sequence
  Synthetic Oligonucleotide
gacgtggactgctcctagctttacg

SEQ ID NO: 10732 - DNA, 25 bp, Artificial Sequence
  Synthetic Oligonucleotide
taagtctggtattttcccctacttg

SEQ ID NO: 10733 - DNA, 25 bp, Artificial Sequence
  Synthetic Oligonucleotide
ctggcgtgatccaggaccccacttg

SEQ ID NO: 10734 - DNA, 25 bp, Artificial Sequence
  Synthetic Oligonucleotide
ttggtgacgaccaggcctccttatg

SEQ ID NO: 10735 - DNA, 25 bp, Artificial Sequence
  Synthetic Oligonucleotide
actgacgatctacacatttacatcg

SEQ ID NO: 10736 - DNA, 25 bp, Artificial Sequence
  Synthetic Oligonucleotide
agtggtcgttataaggtttcatcgt

SEQ ID NO: 10737 - DNA, 25 bp, Artificial Sequence
  Synthetic Oligonucleotide
gtggtgttacgtcggctacgccacg

SEQ ID NO: 10738 - DNA, 25 bp, Artificial Sequence
  Synthetic Oligonucleotide
aaagttatctagcgtcgctccctcg

SEQ ID NO: 10739 - DNA, 25 bp, Artificial Sequence
  Synthetic Oligonucleotide
aaggaaatcatacctgtctccctcg

SEQ ID NO: 10740 - DNA, 25 bp, Artificial Sequence
  Synthetic Oligonucleotide
agataattcgataatgtctcacccg

SEQ ID NO: 10741 - DNA, 25 bp, Artificial Sequence
  Synthetic Oligonucleotide
agtattttgactatgctcgaagacg

SEQ ID NO: 10742 - DNA, 25 bp, Artificial Sequence
  Synthetic Oligonucleotide
acttcttctaactcgtcgccaaacg

SEQ ID NO: 10743 - DNA, 25 bp, Artificial Sequence
  Synthetic Oligonucleotide
tttacgtttaacgtctgccttaccg

SEQ ID NO: 10744 - DNA, 25 bp, Artificial Sequence
  Synthetic Oligonucleotide
tcaacggttacagttatgtcaaccg

SEQ ID NO: 10745 - DNA, 25 bp, Artificial Sequence
  Synthetic Oligonucleotide
gtacccgcttcagtggtgtcagagg

SEQ ID NO: 10746 - DNA, 25 bp, Artificial Sequence
  Synthetic Oligonucleotide
gtgccgcttctacgtccagaccatg

SEQ ID NO: 10747 - DNA, 25 bp, Artificial Sequence
  Synthetic Oligonucleotide
gatttctttcgaaccgagaccagcg

SEQ ID NO: 10748 - DNA, 25 bp, Artificial Sequence
  Synthetic Oligonucleotide
tttactggtacaactaaaacagacg

SEQ ID NO: 10749 - DNA, 25 bp, Artificial Sequence
  Synthetic Oligonucleotide
gtgtctgtgtacgtccacggaaacg

SEQ ID NO: 10750 - DNA, 25 bp, Artificial Sequence
  Synthetic Oligonucleotide
gttagtgaagtaacgcgtgctaacg

SEQ ID NO: 10751 - DNA, 25 bp, Artificial Sequence
  Synthetic Oligonucleotide
ggtcgtacggagtgtcgtgtggaag

SEQ ID NO: 10752 - DNA, 25 bp, Artificial Sequence
  Synthetic Oligonucleotide
gcagctcgtgagcgtcatggagtag

SEQ ID NO: 10753 - DNA, 25 bp, Artificial Sequence
  Synthetic Oligonucleotide
tggagcaggtgccttactctggtag

SEQ ID NO: 10754 - DNA, 25 bp, Artificial Sequence
  Synthetic Oligonucleotide
agccgtatgtgttcgtcgttggtag

SEQ ID NO: 10755 - DNA, 25 bp, Artificial Sequence
  Synthetic Oligonucleotide
aaaatcgcaacgacctcgttggacg

SEQ ID NO: 10756 - DNA, 25 bp, Artificial Sequence
  Synthetic Oligonucleotide
aaaccgccaacgacaactcagttcg

SEQ ID NO: 10757 - DNA, 25 bp, Artificial Sequence
  Synthetic Oligonucleotide
tcccggaacgcgaacgatccgttcg

SEQ ID NO: 10758 - DNA, 25 bp, Artificial Sequence
  Synthetic Oligonucleotide
ctacccgaagggcaactactgttcg

SEQ ID NO: 10759 - DNA, 25 bp, Artificial Sequence
  Synthetic Oligonucleotide
gtcgccggacaaccagctactttcg

SEQ ID NO: 10760 - DNA, 25 bp, Artificial Sequence
  Synthetic Oligonucleotide
tgtgggcgaaaggacgcctcttacg

SEQ ID NO: 10761 - DNA, 25 bp, Artificial Sequence
  Synthetic Oligonucleotide
tgtagaggtccattgccgctcagag

SEQ ID NO: 10762 - DNA, 25 bp, Artificial Sequence
  Synthetic Oligonucleotide
aagtagtccatcagccactctagcg

SEQ ID NO: 10763 - DNA, 25 bp, Artificial Sequence
  Synthetic Oligonucleotide
aggtgctacataagccgtggtcgcg

SEQ ID NO: 10764 - DNA, 25 bp, Artificial Sequence
  Synthetic Oligonucleotide
agaggtcgagttacgccttgtaccg

SEQ ID NO: 10765 - DNA, 25 bp, Artificial Sequence
  Synthetic Oligonucleotide
tacgcgcagttcgacctcatactcg

SEQ ID NO: 10766 - DNA, 25 bp, Artificial Sequence
  Synthetic Oligonucleotide
tgtaacacagccaaacccgtcgtcg

SEQ ID NO: 10767 - DNA, 25 bp, Artificial Sequence
  Synthetic Oligonucleotide
aaggaaaaccccaaacctcgcgtcg

SEQ ID NO: 10768 - DNA, 25 bp, Artificial Sequence
  Synthetic Oligonucleotide
acagaaaaagtctaagaccccgtcg

SEQ ID NO: 10769 - DNA, 25 bp, Artificial Sequence
  Synthetic Oligonucleotide
aaaagcgtggtcgacggctccgttg

SEQ ID NO: 10770 - DNA, 25 bp, Artificial Sequence
  Synthetic Oligonucleotide
agatagccgaacgaacgttccttag

SEQ ID NO: 10771 - DNA, 25 bp, Artificial Sequence
  Synthetic Oligonucleotide
cgaatatccatctaggtctcagaag

SEQ ID NO: 10772 - DNA, 25 bp, Artificial Sequence
  Synthetic Oligonucleotide
ccaaaaccacagtaggacctgagag

SEQ ID NO: 10773 - DNA, 25 bp, Artificial Sequence
  Synthetic Oligonucleotide
cttaaaaacccgttgccttagagag

SEQ ID NO: 10774 - DNA, 25 bp, Artificial Sequence
  Synthetic Oligonucleotide
taacacagacctggaccactcaaag

SEQ ID NO: 10775 - DNA, 25 bp, Artificial Sequence
  Synthetic Oligonucleotide
tattaggtcgcctaccatcgaagcg

SEQ ID NO: 10776 - DNA, 25 bp, Artificial Sequence
  Synthetic Oligonucleotide
tattgtttcgtctacgctatcattg

SEQ ID NO: 10777 - DNA, 25 bp, Artificial Sequence
  Synthetic Oligonucleotide
acgactttgtttgttgcaacttctg

SEQ ID NO: 10778 - DNA, 25 bp, Artificial Sequence
  Synthetic Oligonucleotide
gaccgtccttttgtaacccattctg

SEQ ID NO: 10779 - DNA, 25 bp, Artificial Sequence
  Synthetic Oligonucleotide
tgctatggtttatacgaagtgctcg

SEQ ID NO: 10780 - DNA, 25 bp, Artificial Sequence
  Synthetic Oligonucleotide
ccttcgtcgaacgacgaagcgactg

SEQ ID NO: 10781 - DNA, 25 bp, Artificial Sequence
  Synthetic Oligonucleotide
ttaacctacggaccaaaaccgtatg

SEQ ID NO: 10782 - DNA, 25 bp, Artificial Sequence
  Synthetic Oligonucleotide
tagaccctgtgtggaaaccagtacg

SEQ ID NO: 10783 - DNA, 25 bp, Artificial Sequence
  Synthetic Oligonucleotide
ttcgaccttactacaagacccgtcg

SEQ ID NO: 10784 - DNA, 25 bp, Artificial Sequence
  Synthetic Oligonucleotide
ttgcagctactccatgacgctcacg

SEQ ID NO: 10785 - DNA, 25 bp, Artificial Sequence
  Synthetic Oligonucleotide
ttacacggttctcatgtacccgtcg

SEQ ID NO: 10786 - DNA, 25 bp, Artificial Sequence
  Synthetic Oligonucleotide
gttcacagtcacactgtgtcctacg

SEQ ID NO: 10787 - DNA, 25 bp, Artificial Sequence
  Synthetic Oligonucleotide
tacgacactcgagctactcatcccg

SEQ ID NO: 10788 - DNA, 25 bp, Artificial Sequence
  Synthetic Oligonucleotide
tcaagacacagattacttgtgtccg

SEQ ID NO: 10789 - DNA, 25 bp, Artificial Sequence
  Synthetic Oligonucleotide
acatagaacaactgtcatttacgcg

SEQ ID NO: 10790 - DNA, 25 bp, Artificial Sequence
  Synthetic Oligonucleotide
aaagacgaaatcagcaagttcgacg

SEQ ID NO: 10791 - DNA, 25 bp, Artificial Sequence
  Synthetic Oligonucleotide
tctcaaacctaatcttgaatcacgg

SEQ ID NO: 10792 - DNA, 25 bp, Artificial Sequence
  Synthetic Oligonucleotide
gcaaacgatcattacagaacacaag

SEQ ID NO: 10793 - DNA, 25 bp, Artificial Sequence
  Synthetic Oligonucleotide
actaagacactttcaaggtcgaatg

SEQ ID NO: 10794 - DNA, 25 bp, Artificial Sequence
  Synthetic Oligonucleotide
ccacttgctatctacctggtgaaag

SEQ ID NO: 10795 - DNA, 25 bp, Artificial Sequence
  Synthetic Oligonucleotide
ccctgtccagcatcccgctgttaag

SEQ ID NO: 10796 - DNA, 25 bp, Artificial Sequence
  Synthetic Oligonucleotide
gcatcctgtctatcccggtttcggt

SEQ ID NO: 10797 - DNA, 25 bp, Artificial Sequence
  Synthetic Oligonucleotide
attcttgttacaacggtatatctag

SEQ ID NO: 10798 - DNA, 25 bp, Artificial Sequence
  Synthetic Oligonucleotide
tccgatgtagtaccgggagtgtcag

SEQ ID NO: 10799 - DNA, 25 bp, Artificial Sequence
  Synthetic Oligonucleotide
tgccgcacctgtcaccagtattcag

SEQ ID NO: 10800 - DNA, 25 bp, Artificial Sequence
  Synthetic Oligonucleotide
acgcccactcgcaccagtatataag

SEQ ID NO: 10801 - DNA, 25 bp, Artificial Sequence
  Synthetic Oligonucleotide
gcgcatgcacgcacgcacatacatg

SEQ ID NO: 10802 - DNA, 25 bp, Artificial Sequence
  Synthetic Oligonucleotide
gtcatggtagacgtacacaacaatg

SEQ ID NO: 10803 - DNA, 25 bp, Artificial Sequence
  Synthetic Oligonucleotide
cgtcatggagtagctgcaacgcagg

SEQ ID NO: 10804 - DNA, 25 bp, Artificial Sequence
  Synthetic Oligonucleotide
gtcgacagaagactgcaagtctgag

SEQ ID NO: 10805 - DNA, 25 bp, Artificial Sequence
  Synthetic Oligonucleotide
gtccaagaacgcttggagtagtgag

SEQ ID NO: 10806 - DNA, 25 bp, Artificial Sequence
  Synthetic Oligonucleotide
gttcaagttcgttgtagcacaagag

SEQ ID NO: 10807 - DNA, 25 bp, Artificial Sequence
  Synthetic Oligonucleotide
cagtatataagtcgcactgcaaaag

SEQ ID NO: 10808 - DNA, 25 bp, Artificial Sequence
  Synthetic Oligonucleotide
tacttcagtcactccgacataagcg

SEQ ID NO: 10809 - DNA, 25 bp, Artificial Sequence
  Synthetic Oligonucleotide
gtcttctgtcgactagctaaaatcg

SEQ ID NO: 10810 - DNA, 25 bp, Artificial Sequence
  Synthetic Oligonucleotide
gtacatctggtacatcaactccagt

SEQ ID NO: 10811 - DNA, 25 bp, Artificial Sequence
  Synthetic Oligonucleotide
gtacatctggtacatcaactccagt

SEQ ID NO: 10812 - DNA, 25 bp, Artificial Sequence
  Synthetic Oligonucleotide
gtacatctggtacatcacctccagt

SEQ ID NO: 10813 - DNA, 25 bp, Artificial Sequence
  Synthetic Oligonucleotide
gcgtcatgggtataaacaccgctcg

SEQ ID NO: 10814 - DNA, 25 bp, Artificial Sequence
  Synthetic Oligonucleotide
gctcatcgaccctaatgtccgcgcg

SEQ ID NO: 10815 - DNA, 25 bp, Artificial Sequence
  Synthetic Oligonucleotide
tcatcgaccctaatgtccgcgcgcg

SEQ ID NO: 10816 - DNA, 25 bp, Artificial Sequence
  Synthetic Oligonucleotide
ttcacgaccctaatgtccgcactcg

SEQ ID NO: 10817 - DNA, 25 bp, Artificial Sequence
  Synthetic Oligonucleotide
ggtacaccgcctagtccagctactg

SEQ ID NO: 10818 - DNA, 25 bp, Artificial Sequence
  Synthetic Oligonucleotide
agtacccgtaccacgtccaatactg

SEQ ID NO: 10819 - DNA, 25 bp, Artificial Sequence
  Synthetic Oligonucleotide
catagcgccacgtcgtccaagagtg

SEQ ID NO: 10820 - DNA, 25 bp, Artificial Sequence
  Synthetic Oligonucleotide
ctagccgcgtcgcctcgacaagcgg

SEQ ID NO: 10821 - DNA, 25 bp, Artificial Sequence
  Synthetic Oligonucleotide
tttgcgtcgagtcattgtcaggcgg

SEQ ID NO: 10822 - DNA, 25 bp, Artificial Sequence
  Synthetic Oligonucleotide
agtttcttcggttctatcttggtgg

SEQ ID NO: 10823 - DNA, 25 bp, Artificial Sequence
  Synthetic Oligonucleotide
ttattttctcggatgccctcgaagg

SEQ ID NO: 10824 - DNA, 25 bp, Artificial Sequence
  Synthetic Oligonucleotide
tactgggcgtgaatgacccttaagg

SEQ ID NO: 10825 - DNA, 25 bp, Artificial Sequence
  Synthetic Oligonucleotide
tcttgagttctgaagacccttcaag

SEQ ID NO: 10826 - DNA, 25 bp, Artificial Sequence
  Synthetic Oligonucleotide
ctctgtttgtcaagactctggcaag

SEQ ID NO: 10827 - DNA, 25 bp, Artificial Sequence
  Synthetic Oligonucleotide
tcgtcgtttttcgattagagtccag

SEQ ID NO: 10828 - DNA, 25 bp, Artificial Sequence
  Synthetic Oligonucleotide
ttctcttttgtctcgacatgtcccg

SEQ ID NO: 10829 - DNA, 25 bp, Artificial Sequence
  Synthetic Oligonucleotide
ttttattagtggacgaccttccacg

SEQ ID NO: 10830 - DNA, 25 bp, Artificial Sequence
  Synthetic Oligonucleotide
tttctcttctggacgacttttcacg

SEQ ID NO: 10831 - DNA, 25 bp, Artificial Sequence
  Synthetic Oligonucleotide
cttctttaacggatagtatttcgcg

SEQ ID NO: 10832 - DNA, 25 bp, Artificial Sequence
  Synthetic Oligonucleotide
cgtcttcctacagggactttggtcg

SEQ ID NO: 10833 - DNA, 25 bp, Artificial Sequence
  Synthetic Oligonucleotide
ggtacttccacatcgcgcaaggtgg

SEQ ID NO: 10834 - DNA, 25 bp, Artificial Sequence
  Synthetic Oligonucleotide
gacggctcacgctgaacaacttcgg

SEQ ID NO: 10835 - DNA, 25 bp, Artificial Sequence
  Synthetic Oligonucleotide
aagcgtgctcgaacaagaattgcgg

SEQ ID NO: 10836 - DNA, 25 bp, Artificial Sequence
  Synthetic Oligonucleotide
aagctcccactaccagaaaggtcat

SEQ ID NO: 10837 - DNA, 25 bp, Artificial Sequence
  Synthetic Oligonucleotide
gagctctcactaccaaaaaggtcag

SEQ ID NO: 10838 - DNA, 25 bp, Artificial Sequence
  Synthetic Oligonucleotide
cgtctgaaccactgaaacggtcgag

SEQ ID NO: 10839 - DNA, 25 bp, Artificial Sequence
  Synthetic Oligonucleotide
ctctgtcgccgattcacagttctcg

SEQ ID NO: 10840 - DNA, 25 bp, Artificial Sequence
  Synthetic Oligonucleotide
aggacttgccatcgtagaactgctg

SEQ ID NO: 10841 - DNA, 25 bp, Artificial Sequence
  Synthetic Oligonucleotide
cagcagttctacgatggcaagtcct

SEQ ID NO: 10842 - DNA, 25 bp, Artificial Sequence
  Synthetic Oligonucleotide
cgaactgtttcagcagtaactcccg

SEQ ID NO: 10843 - DNA, 25 bp, Artificial Sequence
  Synthetic Oligonucleotide
gtgaatcgtgtcgcatatatcgaag

SEQ ID NO: 10844 - DNA, 25 bp, Artificial Sequence
  Synthetic Oligonucleotide
aataaatctgtgtcatcgacagaag

SEQ ID NO: 10845 - DNA, 25 bp, Artificial Sequence
  Synthetic Oligonucleotide
tatataaactcacagcaagcaatag

SEQ ID NO: 10846 - DNA, 25 bp, Artificial Sequence
  Synthetic Oligonucleotide
aaaggaactacactgcctgttaaag

SEQ ID NO: 10847 - DNA, 25 bp, Artificial Sequence
  Synthetic Oligonucleotide
atgactatctgtgacagtgtaaacg

SEQ ID NO: 10848 - DNA, 25 bp, Artificial Sequence
  Synthetic Oligonucleotide
tctaggacatctgtggtgtagtagg

SEQ ID NO: 10849 - DNA, 25 bp, Artificial Sequence
  Synthetic Oligonucleotide
agtcacggaaacatgtgacttgatg

SEQ ID NO: 10850 - DNA, 25 bp, Artificial Sequence
  Synthetic Oligonucleotide
aagtggtgatagaggtcactgcttg

SEQ ID NO: 10851 - DNA, 25 bp, Artificial Sequence
  Synthetic Oligonucleotide
aagtggtagagtgttcctatcaatt

SEQ ID NO: 10852 - DNA, 25 bp, Artificial Sequence
  Synthetic Oligonucleotide
agtcgaagagtgcgtcccttaagtt

SEQ ID NO: 10853 - DNA, 25 bp, Artificial Sequence
  Synthetic Oligonucleotide
gggtcatgagtgtcatcagtttgtg

SEQ ID NO: 10854 - DNA, 25 bp, Artificial Sequence
  Synthetic Oligonucleotide
ggtacatctggttctccaggtggtg

SEQ ID NO: 10855 - DNA, 25 bp, Artificial Sequence
  Synthetic Oligonucleotide
aggcgagactcttcctcaacggggg

SEQ ID NO: 10856 - DNA, 25 bp, Artificial Sequence
  Synthetic Oligonucleotide
aagcggaccttctccacgctggtcg

SEQ ID NO: 10857 - DNA, 25 bp, Artificial Sequence
  Synthetic Oligonucleotide
gacgtggactgcacctagctttacg

SEQ ID NO: 10858 - DNA, 25 bp, Artificial Sequence
  Synthetic Oligonucleotide
taagtctggtatattcccctacttg

SEQ ID NO: 10859 - DNA, 25 bp, Artificial Sequence
  Synthetic Oligonucleotide
ctggcgtgatcctggaccccacttg

SEQ ID NO: 10860 - DNA, 25 bp, Artificial Sequence
  Synthetic Oligonucleotide
ttggtgacgacctggcctccttatg

SEQ ID NO: 10861 - DNA, 25 bp, Artificial Sequence
  Synthetic Oligonucleotide
actgacgatctagacatttacatcg

SEQ ID NO: 10862 - DNA, 25 bp, Artificial Sequence
  Synthetic Oligonucleotide
agtggtcgttattaggtttcatcgt

SEQ ID NO: 10863 - DNA, 25 bp, Artificial Sequence
  Synthetic Oligonucleotide
gtggtgttacgtgggctacgccacg

SEQ ID NO: 10864 - DNA, 25 bp, Artificial Sequence
  Synthetic Oligonucleotide
aaagttatctagggtcgctccctcg

SEQ ID NO: 10865 - DNA, 25 bp, Artificial Sequence
  Synthetic Oligonucleotide
aaggaaatcatagctgtctccctcg

SEQ ID NO: 10866 - DNA, 25 bp, Artificial Sequence
  Synthetic Oligonucleotide
agataattcgattatgtctcacccg

SEQ ID NO: 10867 - DNA, 25 bp, Artificial Sequence
  Synthetic Oligonucleotide
agtattttgactttgctcgaagacg

SEQ ID NO: 10868 - DNA, 25 bp, Artificial Sequence
  Synthetic Oligonucleotide
acttcttctaacacgtcgccaaacg

SEQ ID NO: 10869 - DNA, 25 bp, Artificial Sequence
  Synthetic Oligonucleotide
tttacgtttaacctctgccttaccg

SEQ ID NO: 10870 - DNA, 25 bp, Artificial Sequence
  Synthetic Oligonucleotide
tcaacggttacacttatgtcaaccg

SEQ ID NO: 10871 - DNA, 25 bp, Artificial Sequence
  Synthetic Oligonucleotide
gtacccgcttcactggtgtcagagg

SEQ ID NO: 10872 - DNA, 25 bp, Artificial Sequence
  Synthetic Oligonucleotide
gtgccgcttctaggtccagaccatg

SEQ ID NO: 10873 - DNA, 25 bp, Artificial Sequence
  Synthetic Oligonucleotide
gatttctttcgatccgagaccagcg

SEQ ID NO: 10874 - DNA, 25 bp, Artificial Sequence
  Synthetic Oligonucleotide
tttactggtacatctaaaacagacg

SEQ ID NO: 10875 - DNA, 25 bp, Artificial Sequence
  Synthetic Oligonucleotide
gtgtctgtgtacctccacggaaacg

SEQ ID NO: 10876 - DNA, 25 bp, Artificial Sequence
  Synthetic Oligonucleotide
gttagtgaagtatcgcgtgctaacg

SEQ ID NO: 10877 - DNA, 25 bp, Artificial Sequence
  Synthetic Oligonucleotide
ggtcgtacggagagtcgtgtggaag

SEQ ID NO: 10878 - DNA, 25 bp, Artificial Sequence
  Synthetic Oligonucleotide
gcagctcgtgagggtcatggagtag

SEQ ID NO: 10879 - DNA, 25 bp, Artificial Sequence
  Synthetic Oligonucleotide
tggagcaggtgcgttactctggtag

SEQ ID NO: 10880 - DNA, 25 bp, Artificial Sequence
  Synthetic Oligonucleotide
agccgtatgtgtacgtcgttggtag

SEQ ID NO: 10881 - DNA, 25 bp, Artificial Sequence
  Synthetic Oligonucleotide
aaaatcgcaacgtcctcgttggacg

SEQ ID NO: 10882 - DNA, 25 bp, Artificial Sequence
  Synthetic Oligonucleotide
aaaccgccaacgtcaactcagttcg

SEQ ID NO: 10883 - DNA, 25 bp, Artificial Sequence
  Synthetic Oligonucleotide
tcccggaacgcgtacgatccgttcg

SEQ ID NO: 10884 - DNA, 25 bp, Artificial Sequence
  Synthetic Oligonucleotide
ctacccgaaggggaactactgttcg

SEQ ID NO: 10885 - DNA, 25 bp, Artificial Sequence
  Synthetic Oligonucleotide
gtcgccggacaagcagctactttcg

SEQ ID NO: 10886 - DNA, 25 bp, Artificial Sequence
  Synthetic Oligonucleotide
tgtgggcgaaagcacgcctcttacg

SEQ ID NO: 10887 - DNA, 25 bp, Artificial Sequence
  Synthetic Oligonucleotide
tgtagaggtccaatgccgctcagag

SEQ ID NO: 10888 - DNA, 25 bp, Artificial Sequence
  Synthetic Oligonucleotide
aagtagtccatctgccactctagcg

SEQ ID NO: 10889 - DNA, 25 bp, Artificial Sequence
  Synthetic Oligonucleotide
aggtgctacatatgccgtggtcgcg

SEQ ID NO: 10890 - DNA, 25 bp, Artificial Sequence
  Synthetic Oligonucleotide
agaggtcgagtttcgccttgtaccg

SEQ ID NO: 10891 - DNA, 25 bp, Artificial Sequence
  Synthetic Oligonucleotide
tacgcgcagttccacctcatactcg

SEQ ID NO: 10892 - DNA, 25 bp, Artificial Sequence
  Synthetic Oligonucleotide
tgtaacacagcctaacccgtcgtcg

SEQ ID NO: 10893 - DNA, 25 bp, Artificial Sequence
  Synthetic Oligonucleotide
aaggaaaacccctaacctcgcgtcg

SEQ ID NO: 10894 - DNA, 25 bp, Artificial Sequence
  Synthetic Oligonucleotide
acagaaaaagtcaaagaccccgtcg

SEQ ID NO: 10895 - DNA, 25 bp, Artificial Sequence
  Synthetic Oligonucleotide
aaaagcgtggtccacggctccgttg

SEQ ID NO: 10896 - DNA, 25 bp, Artificial Sequence
  Synthetic Oligonucleotide
agatagccgaaccaacgttccttag

SEQ ID NO: 10897 - DNA, 25 bp, Artificial Sequence
  Synthetic Oligonucleotide
cgaatatccatcaaggtctcagaag

SEQ ID NO: 10898 - DNA, 25 bp, Artificial Sequence
  Synthetic Oligonucleotide
ccaaaaccacagaaggacctgagag

SEQ ID NO: 10899 - DNA, 25 bp, Artificial Sequence
  Synthetic Oligonucleotide
cttaaaaacccgatgccttagagag

SEQ ID NO: 10900 - DNA, 25 bp, Artificial Sequence
  Synthetic Oligonucleotide
taacacagacctcgaccactcaaag

SEQ ID NO: 10901 - DNA, 25 bp, Artificial Sequence
  Synthetic Oligonucleotide
tattaggtcgccaaccatcgaagcg

SEQ ID NO: 10902 - DNA, 25 bp, Artificial Sequence
  Synthetic Oligonucleotide
tattgtttcgtcaacgctatcattg

SEQ ID NO: 10903 - DNA, 25 bp, Artificial Sequence
  Synthetic Oligonucleotide
acgactttgtttcttgcaacttctg

SEQ ID NO: 10904 - DNA, 25 bp, Artificial Sequence
  Synthetic Oligonucleotide
gaccgtccttttctaacccattctg

SEQ ID NO: 10905 - DNA, 25 bp, Artificial Sequence
  Synthetic Oligonucleotide
tgctatggtttaaacgaagtgctcg

SEQ ID NO: 10906 - DNA, 25 bp, Artificial Sequence
  Synthetic Oligonucleotide
ccttcgtcgaaccacgaagcgactg

SEQ ID NO: 10907 - DNA, 25 bp, Artificial Sequence
  Synthetic Oligonucleotide
ttaacctacggagcaaaaccgtatg

SEQ ID NO: 10908 - DNA, 25 bp, Artificial Sequence
  Synthetic Oligonucleotide
tagaccctgtgtcgaaaccagtacg

SEQ ID NO: 10909 - DNA, 25 bp, Artificial Sequence
  Synthetic Oligonucleotide
ttcgaccttacttcaagacccgtcg

SEQ ID NO: 10910 - DNA, 25 bp, Artificial Sequence
  Synthetic Oligonucleotide
ttgcagctactcgatgacgctcacg

SEQ ID NO: 10911 - DNA, 25 bp, Artificial Sequence
  Synthetic Oligonucleotide
ttacacggttctgatgtacccgtcg

SEQ ID NO: 10912 - DNA, 25 bp, Artificial Sequence
  Synthetic Oligonucleotide
gttcacagtcactctgtgtcctacg

SEQ ID NO: 10913 - DNA, 25 bp, Artificial Sequence
  Synthetic Oligonucleotide
tacgacactcgacctactcatcccg

SEQ ID NO: 10914 - DNA, 25 bp, Artificial Sequence
  Synthetic Oligonucleotide
tcaagacacagaatacttgtgtccg

SEQ ID NO: 10915 - DNA, 25 bp, Artificial Sequence
  Synthetic Oligonucleotide
acatagaacaacagtcatttacgcg

SEQ ID NO: 10916 - DNA, 25 bp, Artificial Sequence
  Synthetic Oligonucleotide
aaagacgaaatctgcaagttcgacg

SEQ ID NO: 10917 - DNA, 25 bp, Artificial Sequence
  Synthetic Oligonucleotide
tctcaaacctaaacttgaatcacgg

SEQ ID NO: 10918 - DNA, 25 bp, Artificial Sequence
  Synthetic Oligonucleotide
gcaaacgatcataacagaacacaag

SEQ ID NO: 10919 - DNA, 25 bp, Artificial Sequence
  Synthetic Oligonucleotide
actaagacacttacaaggtcgaatg

SEQ ID NO: 10920 - DNA, 25 bp, Artificial Sequence
  Synthetic Oligonucleotide
ccacttgctatcaacctggtgaaag

SEQ ID NO: 10921 - DNA, 25 bp, Artificial Sequence
  Synthetic Oligonucleotide
ccctgtccagcaacccgctgttaag

SEQ ID NO: 10922 - DNA, 25 bp, Artificial Sequence
  Synthetic Oligonucleotide
gcatcctgtctaacccggtttcggt

SEQ ID NO: 10923 - DNA, 25 bp, Artificial Sequence
  Synthetic Oligonucleotide
attcttgttacatcggtatatctag

SEQ ID NO: 10924 - DNA, 25 bp, Artificial Sequence
  Synthetic Oligonucleotide
tccgatgtagtagcgggagtgtcag

SEQ ID NO: 10925 - DNA, 25 bp, Artificial Sequence
  Synthetic Oligonucleotide
tgccgcacctgtgaccagtattcag

SEQ ID NO: 10926 - DNA, 25 bp, Artificial Sequence
  Synthetic Oligonucleotide
acgcccactcgctccagtatataag

SEQ ID NO: 10927 - DNA, 25 bp, Artificial Sequence
  Synthetic Oligonucleotide
gcgcatgcacgctcgcacatacatg

SEQ ID NO: 10928 - DNA, 25 bp, Artificial Sequence
  Synthetic Oligonucleotide
gtcatggtagacctacacaacaatg

SEQ ID NO: 10929 - DNA, 25 bp, Artificial Sequence
  Synthetic Oligonucleotide
cgtcatggagtacctgcaacgcagg

SEQ ID NO: 10930 - DNA, 25 bp, Artificial Sequence
  Synthetic Oligonucleotide
gtcgacagaagagtgcaagtctgag

SEQ ID NO: 10931 - DNA, 25 bp, Artificial Sequence
  Synthetic Oligonucleotide
gtccaagaacgcatggagtagtgag

SEQ ID NO: 10932 - DNA, 25 bp, Artificial Sequence
  Synthetic Oligonucleotide
gttcaagttcgtagtagcacaagag

SEQ ID NO: 10933 - DNA, 25 bp, Artificial Sequence
  Synthetic Oligonucleotide
cagtatataagtggcactgcaaaag

SEQ ID NO: 10934 - DNA, 25 bp, Artificial Sequence
  Synthetic Oligonucleotide
tacttcagtcacaccgacataagcg

SEQ ID NO: 10935 - DNA, 25 bp, Artificial Sequence
  Synthetic Oligonucleotide
gtcttctgtcgagtagctaaaatcg

SEQ ID NO: 10936 - DNA, 25 bp, Artificial Sequence
  Synthetic Oligonucleotide
gtacatctggtagatcaactccagt

SEQ ID NO: 10937 - DNA, 25 bp, Artificial Sequence
  Synthetic Oligonucleotide
gtacatctggtagatcaactccagt

SEQ ID NO: 10938 - DNA, 25 bp, Artificial Sequence
  Synthetic Oligonucleotide
gtacatctggtagatcacctccagt

SEQ ID NO: 10939 - DNA, 25 bp, Artificial Sequence
  Synthetic Oligonucleotide
gcgtcatgggtaaaaacaccgctcg

SEQ ID NO: 10940 - DNA, 25 bp, Artificial Sequence
  Synthetic Oligonucleotide
gctcatcgacccaaatgtccgcgcg

SEQ ID NO: 10941 - DNA, 25 bp, Artificial Sequence
  Synthetic Oligonucleotide
tcatcgaccctattgtccgcgcgcg

SEQ ID NO: 10942 - DNA, 25 bp, Artificial Sequence
  Synthetic Oligonucleotide
ttcacgaccctattgtccgcactcg

SEQ ID NO: 10943 - DNA, 25 bp, Artificial Sequence
  Synthetic Oligonucleotide
ggtacaccgccttgtccagctactg

SEQ ID NO: 10944 - DNA, 25 bp, Artificial Sequence
  Synthetic Oligonucleotide
agtacccgtacctcgtccaatactg

SEQ ID NO: 10945 - DNA, 25 bp, Artificial Sequence
  Synthetic Oligonucleotide
catagcgccacgacgtccaagagtg

SEQ ID NO: 10946 - DNA, 25 bp, Artificial Sequence
  Synthetic Oligonucleotide
ctagccgcgtcggctcgacaagcgg

SEQ ID NO: 10947 - DNA, 25 bp, Artificial Sequence
  Synthetic Oligonucleotide
tttgcgtcgagtgattgtcaggcgg

SEQ ID NO: 10948 - DNA, 25 bp, Artificial Sequence
  Synthetic Oligonucleotide
agtttcttcggtactatcttggtgg

SEQ ID NO: 10949 - DNA, 25 bp, Artificial Sequence
  Synthetic Oligonucleotide
ttattttctcggttgccctcgaagg

SEQ ID NO: 10950 - DNA, 25 bp, Artificial Sequence
  Synthetic Oligonucleotide
tactgggcgtgattgacccttaagg

SEQ ID NO: 10951 - DNA, 25 bp, Artificial Sequence
  Synthetic Oligonucleotide
tcttgagttctgtagacccttcaag

SEQ ID NO: 10952 - DNA, 25 bp, Artificial Sequence
  Synthetic Oligonucleotide
ctctgtttgtcatgactctggcaag

SEQ ID NO: 10953 - DNA, 25 bp, Artificial Sequence
  Synthetic Oligonucleotide
tcgtcgtttttccattagagtccag

SEQ ID NO: 10954 - DNA, 25 bp, Artificial Sequence
  Synthetic Oligonucleotide
ttctcttttgtcacgacatgtcccg

SEQ ID NO: 10955 - DNA, 25 bp, Artificial Sequence
  Synthetic Oligonucleotide
ttttattagtggtcgaccttccacg

SEQ ID NO: 10956 - DNA, 25 bp, Artificial Sequence
  Synthetic Oligonucleotide
tttctcttctggtcgacttttcacg

SEQ ID NO: 10957 - DNA, 25 bp, Artificial Sequence
  Synthetic Oligonucleotide
cttctttaacggttagtatttcgcg

SEQ ID NO: 10958 - DNA, 25 bp, Artificial Sequence
  Synthetic Oligonucleotide
cgtcttcctacacggactttggtcg

SEQ ID NO: 10959 - DNA, 25 bp, Artificial Sequence
  Synthetic Oligonucleotide
ggtacttccacaacgcgcaaggtgg

SEQ ID NO: 10960 - DNA, 25 bp, Artificial Sequence
  Synthetic Oligonucleotide
gacggctcacgcagaacaacttcgg

SEQ ID NO: 10961 - DNA, 25 bp, Artificial Sequence
  Synthetic Oligonucleotide
aagcgtgctcgatcaagaattgcgg

SEQ ID NO: 10962 - DNA, 25 bp, Artificial Sequence
  Synthetic Oligonucleotide
aagctcccactagcagaaaggtcat

SEQ ID NO: 10963 - DNA, 25 bp, Artificial Sequence
  Synthetic Oligonucleotide
gagctctcactagcaaaaaggtcag

SEQ ID NO: 10964 - DNA, 25 bp, Artificial Sequence
  Synthetic Oligonucleotide
cgtctgaaccacagaaacggtcgag

SEQ ID NO: 10965 - DNA, 25 bp, Artificial Sequence
  Synthetic Oligonucleotide
ctctgtcgccgaatcacagttctcg

SEQ ID NO: 10966 - DNA, 25 bp, Artificial Sequence
  Synthetic Oligonucleotide
cagcagttctacgatggcaagtcct

SEQ ID NO: 10967 - DNA, 25 bp, Artificial Sequence
  Synthetic Oligonucleotide
aggacttgccatcgtagaactgctg

SEQ ID NO: 10968 - DNA, 25 bp, Artificial Sequence
  Synthetic Oligonucleotide
aggtcatgcgtcactacaaaggtcg

SEQ ID NO: 10969 - DNA, 25 bp, Artificial Sequence
  Synthetic Oligonucleotide
gacgtaatgcccgtacatcgcgttg

SEQ ID NO: 10970 - DNA, 25 bp, Artificial Sequence
  Synthetic Oligonucleotide
acgacaacttcagtgtcctctgttg

SEQ ID NO: 10971 - DNA, 25 bp, Artificial Sequence
  Synthetic Oligonucleotide
agaaactcgttatttcggctattgt

SEQ ID NO: 10972 - DNA, 25 bp, Artificial Sequence
  Synthetic Oligonucleotide
agagaaactacagtgcgtgctaaag

SEQ ID NO: 10973 - DNA, 25 bp, Artificial Sequence
  Synthetic Oligonucleotide
gtacaaatcgaccgggtttacaacg

SEQ ID NO: 10974 - DNA, 25 bp, Artificial Sequence
  Synthetic Oligonucleotide
atcagaaccgacagggtcttgagtg

SEQ ID NO: 10975 - DNA, 25 bp, Artificial Sequence
  Synthetic Oligonucleotide
aactcgtgaaagagggtcttgactg

SEQ ID NO: 10976 - DNA, 25 bp, Artificial Sequence
  Synthetic Oligonucleotide
aatcgtaaaacgagtttctttgtcg

SEQ ID NO: 10977 - DNA, 25 bp, Artificial Sequence
  Synthetic Oligonucleotide
gctcgaaactacgtacttttttaag

SEQ ID NO: 10978 - DNA, 25 bp, Artificial Sequence
  Synthetic Oligonucleotide
cactgaagatacgtatcccttttcg

SEQ ID NO: 10979 - DNA, 25 bp, Artificial Sequence
  Synthetic Oligonucleotide
taatccgatattatagccgcctttg

SEQ ID NO: 10980 - DNA, 25 bp, Artificial Sequence
  Synthetic Oligonucleotide
tgaaacgagtttttatcaccctttg

SEQ ID NO: 10981 - DNA, 25 bp, Artificial Sequence
  Synthetic Oligonucleotide
tcaaacttctatgtttgctattgtg

SEQ ID NO: 10982 - DNA, 25 bp, Artificial Sequence
  Synthetic Oligonucleotide
gaaaacttgtcttcttatgcttttg

SEQ ID NO: 10983 - DNA, 25 bp, Artificial Sequence
  Synthetic Oligonucleotide
tgctggtctccgtatgtccctgtcg

SEQ ID NO: 10984 - DNA, 25 bp, Artificial Sequence
  Synthetic Oligonucleotide
gaccctcgggtccatgttccacttg

SEQ ID NO: 10985 - DNA, 25 bp, Artificial Sequence
  Synthetic Oligonucleotide
aattgggttcgctgtctccactcag

SEQ ID NO: 10986 - DNA, 25 bp, Artificial Sequence
  Synthetic Oligonucleotide
ctgttaggtcttgtcctcgcatcgg

SEQ ID NO: 10987 - DNA, 25 bp, Artificial Sequence
  Synthetic Oligonucleotide
ctgcagtatttggtcctttaggtgt

SEQ ID NO: 10988 - DNA, 25 bp, Artificial Sequence
  Synthetic Oligonucleotide
ccaggtaatttggttgcttcggtgt

SEQ ID NO: 10989 - DNA, 25 bp, Artificial Sequence
  Synthetic Oligonucleotide
ttcgttgactttgttgtcttcgaag

SEQ ID NO: 10990 - DNA, 25 bp, Artificial Sequence
  Synthetic Oligonucleotide
tacttgcaaagagctttccgacgag

SEQ ID NO: 10991 - DNA, 25 bp, Artificial Sequence
  Synthetic Oligonucleotide
accttggaaacgactcttctaacag

SEQ ID NO: 10992 - DNA, 25 bp, Artificial Sequence
  Synthetic Oligonucleotide
tcttggaacagcaagtcttagaacg

SEQ ID NO: 10993 - DNA, 25 bp, Artificial Sequence
  Synthetic Oligonucleotide
gcttgtggtacagtttctaacactg

SEQ ID NO: 10994 - DNA, 25 bp, Artificial Sequence
  Synthetic Oligonucleotide
gtttcggaaccctaccttcacgtag

SEQ ID NO: 10995 - DNA, 25 bp, Artificial Sequence
  Synthetic Oligonucleotide
ggtattttcccctacttgtctactg

SEQ ID NO: 10996 - DNA, 25 bp, Artificial Sequence
  Synthetic Oligonucleotide
agtatcctcctctttcatggtactg

SEQ ID NO: 10997 - DNA, 25 bp, Artificial Sequence
  Synthetic Oligonucleotide
gtgctcgactgctgtcggtacgtcg

SEQ ID NO: 10998 - DNA, 25 bp, Artificial Sequence
  Synthetic Oligonucleotide
aactaactgagtccacgtcaactag

SEQ ID NO: 10999 - DNA, 25 bp, Artificial Sequence
  Synthetic Oligonucleotide
ggaactaaagacccggtacgaagag

SEQ ID NO: 11000 - DNA, 25 bp, Artificial Sequence
  Synthetic Oligonucleotide
ggtgaactaaaacctccctagagcg

SEQ ID NO: 11001 - DNA, 25 bp, Artificial Sequence
  Synthetic Oligonucleotide
ggtaaactacaatcaccccagagcg

SEQ ID NO: 11002 - DNA, 25 bp, Artificial Sequence
  Synthetic Oligonucleotide
tatctacccgtgtcacacccactgg

SEQ ID NO: 11003 - DNA, 25 bp, Artificial Sequence
  Synthetic Oligonucleotide
tatcccggagagaacgagtcacagg

SEQ ID NO: 11004 - DNA, 25 bp, Artificial Sequence
  Synthetic Oligonucleotide
cacgccggtaggagttcgacgaacg

SEQ ID NO: 11005 - DNA, 25 bp, Artificial Sequence
  Synthetic Oligonucleotide
ggccgcgtacgtccagttcgagtgg

SEQ ID NO: 11006 - DNA, 25 bp, Artificial Sequence
  Synthetic Oligonucleotide
gcatcagccggtttcatgcaggtag

SEQ ID NO: 11007 - DNA, 25 bp, Artificial Sequence
  Synthetic Oligonucleotide
acattaggcggtttcatgctggtag

SEQ ID NO: 11008 - DNA, 25 bp, Artificial Sequence
  Synthetic Oligonucleotide
aaagagggtcttgactgcaccgacg

SEQ ID NO: 11009 - DNA, 25 bp, Artificial Sequence
  Synthetic Oligonucleotide
accggtggtcatgctagcgccgtcg

SEQ ID NO: 11010 - DNA, 25 bp, Artificial Sequence
  Synthetic Oligonucleotide
ccgcttgtcgaggcgacgcggctag

SEQ ID NO: 11011 - DNA, 25 bp, Artificial Sequence
  Synthetic Oligonucleotide
gagcgggtgtagtcgccgttctacg

SEQ ID NO: 11012 - DNA, 25 bp, Artificial Sequence
  Synthetic Oligonucleotide
aagtggaggtagtcgcagacgaacg

SEQ ID NO: 11013 - DNA, 25 bp, Artificial Sequence
  Synthetic Oligonucleotide
gaatacgtggacttggattataaag

SEQ ID NO: 11014 - DNA, 25 bp, Artificial Sequence
  Synthetic Oligonucleotide
gaaaggtcgcttttattcagagacg

SEQ ID NO: 11015 - DNA, 25 bp, Artificial Sequence
  Synthetic Oligonucleotide
aaatggccgcttctagttagagacg

SEQ ID NO: 11016 - DNA, 25 bp, Artificial Sequence
  Synthetic Oligonucleotide
gaatggccgtttctactctgcgacg

SEQ ID NO: 11017 - DNA, 25 bp, Artificial Sequence
  Synthetic Oligonucleotide
gaacggccgcttctactctgcgacg

SEQ ID NO: 11018 - DNA, 25 bp, Artificial Sequence
  Synthetic Oligonucleotide
tgaaagttatctagcgtcgctccct

SEQ ID NO: 11019 - DNA, 25 bp, Artificial Sequence
  Synthetic Oligonucleotide
gaagagtgttgcagcgcccgtcgct

SEQ ID NO: 11020 - DNA, 25 bp, Artificial Sequence
  Synthetic Oligonucleotide
agaaaaagtctaagaccccgtcgag

SEQ ID NO: 11021 - DNA, 25 bp, Artificial Sequence
  Synthetic Oligonucleotide
gacgaagaaagcagcctcccgacag

SEQ ID NO: 11022 - DNA, 25 bp, Artificial Sequence
  Synthetic Oligonucleotide
gggatgacgcccagccgttcgcctg

SEQ ID NO: 11023 - DNA, 25 bp, Artificial Sequence
  Synthetic Oligonucleotide
ggctgacccactacctgtcgcatag

SEQ ID NO: 11024 - DNA, 25 bp, Artificial Sequence
  Synthetic Oligonucleotide
gctagagccgccatggtacgcagag

SEQ ID NO: 11025 - DNA, 25 bp, Artificial Sequence
  Synthetic Oligonucleotide
aacgaacggccgtttctagtcagag

SEQ ID NO: 11026 - DNA, 25 bp, Artificial Sequence
  Synthetic Oligonucleotide
taaacgagaccactttctagggtag

SEQ ID NO: 11027 - DNA, 25 bp, Artificial Sequence
  Synthetic Oligonucleotide
ctaaaggtaactactgttcgaaggg

SEQ ID NO: 11028 - DNA, 25 bp, Artificial Sequence
  Synthetic Oligonucleotide
tacatgtgtaatatttgtcacacag

SEQ ID NO: 11029 - DNA, 25 bp, Artificial Sequence
  Synthetic Oligonucleotide
tcgcatttaaccttgctgcactcat

SEQ ID NO: 11030 - DNA, 25 bp, Artificial Sequence
  Synthetic Oligonucleotide
taggcgcctttgacaagcccttcat

SEQ ID NO: 11031 - DNA, 25 bp, Artificial Sequence
  Synthetic Oligonucleotide
gtcctttgttaagaccgagtatcct

SEQ ID NO: 11032 - DNA, 25 bp, Artificial Sequence
  Synthetic Oligonucleotide
gtccattcgggaccgacggaggtgg

SEQ ID NO: 11033 - DNA, 25 bp, Artificial Sequence
  Synthetic Oligonucleotide
tctcattggtgcaagtgagttctag

SEQ ID NO: 11034 - DNA, 25 bp, Artificial Sequence
  Synthetic Oligonucleotide
tacatctcgggtcacaggtgccgag

SEQ ID NO: 11035 - DNA, 25 bp, Artificial Sequence
  Synthetic Oligonucleotide
tctatcccggtttcggtgtccttag

SEQ ID NO: 11036 - DNA, 25 bp, Artificial Sequence
  Synthetic Oligonucleotide
tttagtcacggaaacttgtgacttg

SEQ ID NO: 11037 - DNA, 25 bp, Artificial Sequence
  Synthetic Oligonucleotide
tcttttaacggtcttttgacatacg

SEQ ID NO: 11038 - DNA, 25 bp, Artificial Sequence
  Synthetic Oligonucleotide
gttattttacatccttcaggagatg

SEQ ID NO: 11039 - DNA, 25 bp, Artificial Sequence
  Synthetic Oligonucleotide
gtggattaatcctccgcacgactcg

SEQ ID NO: 11040 - DNA, 25 bp, Artificial Sequence
  Synthetic Oligonucleotide
aactgtaatagctaccacagactcg

SEQ ID NO: 11041 - DNA, 25 bp, Artificial Sequence
  Synthetic Oligonucleotide
ccatgaaataactaccatgtactgt

SEQ ID NO: 11042 - DNA, 25 bp, Artificial Sequence
  Synthetic Oligonucleotide
gaaagaaagacctcctcgttactag

SEQ ID NO: 11043 - DNA, 25 bp, Artificial Sequence
  Synthetic Oligonucleotide
ccaactaaaccgtggacgtctactg

SEQ ID NO: 11044 - DNA, 25 bp, Artificial Sequence
  Synthetic Oligonucleotide
tctcaacgtaaacggaaacctgagt

SEQ ID NO: 11045 - DNA, 25 bp, Artificial Sequence
  Synthetic Oligonucleotide
atcagagtacctacgggcggctgag

SEQ ID NO: 11046 - DNA, 25 bp, Artificial Sequence
  Synthetic Oligonucleotide
aacaggtatcgaaggagggtcttag

SEQ ID NO: 11047 - DNA, 25 bp, Artificial Sequence
  Synthetic Oligonucleotide
gaaaacgcgaagtcggacgcgtaag

SEQ ID NO: 11048 - DNA, 25 bp, Artificial Sequence
  Synthetic Oligonucleotide
catatttctcaacacggacgcagag

SEQ ID NO: 11049 - DNA, 25 bp, Artificial Sequence
  Synthetic Oligonucleotide
tatttgcctaattacggctctgtag

SEQ ID NO: 11050 - DNA, 25 bp, Artificial Sequence
  Synthetic Oligonucleotide
cagtccccgagacgacggatttacg

SEQ ID NO: 11051 - DNA, 25 bp, Artificial Sequence
  Synthetic Oligonucleotide
gacacaggacgaggctcatctgtcg

SEQ ID NO: 11052 - DNA, 25 bp, Artificial Sequence
  Synthetic Oligonucleotide
ggagacaaacctcctctgtctgacg

SEQ ID NO: 11053 - DNA, 25 bp, Artificial Sequence
  Synthetic Oligonucleotide
acaacagtaactctcgttacggtcg

SEQ ID NO: 11054 - DNA, 25 bp, Artificial Sequence
  Synthetic Oligonucleotide
cgaagagttctgctcgtcactctag

SEQ ID NO: 11055 - DNA, 25 bp, Artificial Sequence
  Synthetic Oligonucleotide
accagaagtccgtcgcgacctcgag

SEQ ID NO: 11056 - DNA, 25 bp, Artificial Sequence
  Synthetic Oligonucleotide
gcgagacagcgggtccgacctcacg

SEQ ID NO: 11057 - DNA, 25 bp, Artificial Sequence
  Synthetic Oligonucleotide
gctagactgcggtgtcgacgtccag

SEQ ID NO: 11058 - DNA, 25 bp, Artificial Sequence
  Synthetic Oligonucleotide
ttagatcgtcggtagtcgttctcat

SEQ ID NO: 11059 - DNA, 25 bp, Artificial Sequence
  Synthetic Oligonucleotide
tttaaatcgtgctagtcgtgttcag

SEQ ID NO: 11060 - DNA, 25 bp, Artificial Sequence
  Synthetic Oligonucleotide
tgtcccatcgaatagttgtccgacg

SEQ ID NO: 11061 - DNA, 25 bp, Artificial Sequence
  Synthetic Oligonucleotide
ccttcgaccgaagagttctgctcgt

SEQ ID NO: 11062 - DNA, 25 bp, Artificial Sequence
  Synthetic Oligonucleotide
cccttcgaccgaagagttctgctcg

SEQ ID NO: 11063 - DNA, 25 bp, Artificial Sequence
  Synthetic Oligonucleotide
acctgtccagtggcggctactctcg

SEQ ID NO: 11064 - DNA, 25 bp, Artificial Sequence
  Synthetic Oligonucleotide
aaaactgtcggaagcctcccttagt

SEQ ID NO: 11065 - DNA, 25 bp, Artificial Sequence
  Synthetic Oligonucleotide
caaaactgtcggaagcctcccttag

SEQ ID NO: 11066 - DNA, 25 bp, Artificial Sequence
  Synthetic Oligonucleotide
acctacgtagtgaccctcacacaag

SEQ ID NO: 11067 - DNA, 25 bp, Artificial Sequence
  Synthetic Oligonucleotide
acggtagatcggtccgtcagaactg

SEQ ID NO: 11068 - DNA, 25 bp, Artificial Sequence
  Synthetic Oligonucleotide
accagacgtcagaaccgcaggctcg

SEQ ID NO: 11069 - DNA, 25 bp, Artificial Sequence
  Synthetic Oligonucleotide
cgaggtacgtctgaccgcaggtgtg

SEQ ID NO: 11070 - DNA, 25 bp, Artificial Sequence
  Synthetic Oligonucleotide
gctcttgcctcgtctcgagcgcgtg

SEQ ID NO: 11071 - DNA, 25 bp, Artificial Sequence
  Synthetic Oligonucleotide
cgagaatggccgcttcggtagagtg

SEQ ID NO: 11072 - DNA, 25 bp, Artificial Sequence
  Synthetic Oligonucleotide
ataagtcgagccctaccagtgactg

SEQ ID NO: 11073 - DNA, 25 bp, Artificial Sequence
  Synthetic Oligonucleotide
gaacgcgagtcctcctcgttactag

SEQ ID NO: 11074 - DNA, 25 bp, Artificial Sequence
  Synthetic Oligonucleotide
gcagcggtctcagctcgtgctacgg

SEQ ID NO: 11075 - DNA, 25 bp, Artificial Sequence
  Synthetic Oligonucleotide
catcgttcgtaaccacggacacggt

SEQ ID NO: 11076 - DNA, 25 bp, Artificial Sequence
  Synthetic Oligonucleotide
actgttctagctcacgtaaccgtcg

SEQ ID NO: 11077 - DNA, 25 bp, Artificial Sequence
  Synthetic Oligonucleotide
gagttgttaacagccgcgtaacatg

SEQ ID NO: 11078 - DNA, 25 bp, Artificial Sequence
  Synthetic Oligonucleotide
ggacgggtcgaagacttagaaccag

SEQ ID NO: 11079 - DNA, 25 bp, Artificial Sequence
  Synthetic Oligonucleotide
ggggcgattcaagcaatggcctacg

SEQ ID NO: 11080 - DNA, 25 bp, Artificial Sequence
  Synthetic Oligonucleotide
gggtcattctcagaagtgtttctag

SEQ ID NO: 11081 - DNA, 25 bp, Artificial Sequence
  Synthetic Oligonucleotide
tagtcttttacaacacagtttcctg

SEQ ID NO: 11082 - DNA, 25 bp, Artificial Sequence
  Synthetic Oligonucleotide
atccttctcggctgtagcttcctag

SEQ ID NO: 11083 - DNA, 25 bp, Artificial Sequence
  Synthetic Oligonucleotide
taccttacgtaagaagacttcctcg

SEQ ID NO: 11084 - DNA, 25 bp, Artificial Sequence
  Synthetic Oligonucleotide
acgcttacgactgtactcattgctg

SEQ ID NO: 11085 - DNA, 25 bp, Artificial Sequence
  Synthetic Oligonucleotide
acgagtatcacacgccgacgggctg

SEQ ID NO: 11086 - DNA, 25 bp, Artificial Sequence
  Synthetic Oligonucleotide
aggtagtgttacgggcaccatgctg

SEQ ID NO: 11087 - DNA, 25 bp, Artificial Sequence
  Synthetic Oligonucleotide
ggtagtgtttgtacccccgtagtcg

SEQ ID NO: 11088 - DNA, 25 bp, Artificial Sequence
  Synthetic Oligonucleotide
ggttcggtgtttgaaacccgtgagt

SEQ ID NO: 11089 - DNA, 25 bp, Artificial Sequence
  Synthetic Oligonucleotide
gtataggtgtgacaaccgaaggact

SEQ ID NO: 11090 - DNA, 25 bp, Artificial Sequence
  Synthetic Oligonucleotide
actacgtgtagaccgggaccaaggg

SEQ ID NO: 11091 - DNA, 25 bp, Artificial Sequence
  Synthetic Oligonucleotide
gaccgggtccgaagtcccggtctcg

SEQ ID NO: 11092 - DNA, 25 bp, Artificial Sequence
  Synthetic Oligonucleotide
aggacttgccatcgtagaactgctg

SEQ ID NO: 11093 - DNA, 25 bp, Artificial Sequence
  Synthetic Oligonucleotide
cagcagttctacgatggcaagtcct

SEQ ID NO: 11094 - DNA, 25 bp, Artificial Sequence
  Synthetic Oligonucleotide
aggtcatgcgtctctacaaaggtcg

SEQ ID NO: 11095 - DNA, 25 bp, Artificial Sequence
  Synthetic Oligonucleotide
gacgtaatgcccctacatcgcgttg

SEQ ID NO: 11096 - DNA, 25 bp, Artificial Sequence
  Synthetic Oligonucleotide
acgacaacttcactgtcctctgttg

SEQ ID NO: 11097 - DNA, 25 bp, Artificial Sequence
  Synthetic Oligonucleotide
agaaactcgttaattcggctattgt

SEQ ID NO: 11098 - DNA, 25 bp, Artificial Sequence
  Synthetic Oligonucleotide
agagaaactacactgcgtgctaaag

SEQ ID NO: 11099 - DNA, 25 bp, Artificial Sequence
  Synthetic Oligonucleotide
gtacaaatcgacggggtttacaacg

SEQ ID NO: 11100 - DNA, 25 bp, Artificial Sequence
  Synthetic Oligonucleotide
atcagaaccgactgggtcttgagtg

SEQ ID NO: 11101 - DNA, 25 bp, Artificial Sequence
  Synthetic Oligonucleotide
aactcgtgaaagtgggtcttgactg

SEQ ID NO: 11102 - DNA, 25 bp, Artificial Sequence
  Synthetic Oligonucleotide
aatcgtaaaacgtgtttctttgtcg

SEQ ID NO: 11103 - DNA, 25 bp, Artificial Sequence
  Synthetic Oligonucleotide
gctcgaaactacctacttttttaag

SEQ ID NO: 11104 - DNA, 25 bp, Artificial Sequence
  Synthetic Oligonucleotide
cactgaagatacctatcccttttcg

SEQ ID NO: 11105 - DNA, 25 bp, Artificial Sequence
  Synthetic Oligonucleotide
taatccgatattttagccgcctttg

SEQ ID NO: 11106 - DNA, 25 bp, Artificial Sequence
  Synthetic Oligonucleotide
tgaaacgagtttatatcaccctttg

SEQ ID NO: 11107 - DNA, 25 bp, Artificial Sequence
  Synthetic Oligonucleotide
tcaaacttctatctttgctattgtg

SEQ ID NO: 11108 - DNA, 25 bp, Artificial Sequence
  Synthetic Oligonucleotide
gaaaacttgtctacttatgcttttg

SEQ ID NO: 11109 - DNA, 25 bp, Artificial Sequence
  Synthetic Oligonucleotide
tgctggtctccgaatgtccctgtcg

SEQ ID NO: 11110 - DNA, 25 bp, Artificial Sequence
  Synthetic Oligonucleotide
gaccctcgggtcgatgttccacttg

SEQ ID NO: 11111 - DNA, 25 bp, Artificial Sequence
  Synthetic Oligonucleotide
aattgggttcgcagtctccactcag

SEQ ID NO: 11112 - DNA, 25 bp, Artificial Sequence
  Synthetic Oligonucleotide
ctgttaggtcttctcctcgcatcgg

SEQ ID NO: 11113 - DNA, 25 bp, Artificial Sequence
  Synthetic Oligonucleotide
ctgcagtatttgctcctttaggtgt

SEQ ID NO: 11114 - DNA, 25 bp, Artificial Sequence
  Synthetic Oligonucleotide
ccaggtaatttgcttgcttcggtgt

SEQ ID NO: 11115 - DNA, 25 bp, Artificial Sequence
  Synthetic Oligonucleotide
ttcgttgactttcttgtcttcgaag

SEQ ID NO: 11116 - DNA, 25 bp, Artificial Sequence
  Synthetic Oligonucleotide
tacttgcaaagacctttccgacgag

SEQ ID NO: 11117 - DNA, 25 bp, Artificial Sequence
  Synthetic Oligonucleotide
accttggaaacgtctcttctaacag

SEQ ID NO: 11118 - DNA, 25 bp, Artificial Sequence
  Synthetic Oligonucleotide
tcttggaacagctagtcttagaacg

SEQ ID NO: 11119 - DNA, 25 bp, Artificial Sequence
  Synthetic Oligonucleotide
gcttgtggtacactttctaacactg

SEQ ID NO: 11120 - DNA, 25 bp, Artificial Sequence
  Synthetic Oligonucleotide
gtttcggaacccaaccttcacgtag

SEQ ID NO: 11121 - DNA, 25 bp, Artificial Sequence
  Synthetic Oligonucleotide
ggtattttccccaacttgtctactg

SEQ ID NO: 11122 - DNA, 25 bp, Artificial Sequence
  Synthetic Oligonucleotide
agtatcctcctcattcatggtactg

SEQ ID NO: 11123 - DNA, 25 bp, Artificial Sequence
  Synthetic Oligonucleotide
gtgctcgactgcagtcggtacgtcg

SEQ ID NO: 11124 - DNA, 25 bp, Artificial Sequence
  Synthetic Oligonucleotide
aactaactgagtgcacgtcaactag

SEQ ID NO: 11125 - DNA, 25 bp, Artificial Sequence
  Synthetic Oligonucleotide
ggaactaaagacgcggtacgaagag

SEQ ID NO: 11126 - DNA, 25 bp, Artificial Sequence
  Synthetic Oligonucleotide
ggtgaactaaaagctccctagagcg

SEQ ID NO: 11127 - DNA, 25 bp, Artificial Sequence
  Synthetic Oligonucleotide
ggtaaactacaaacaccccagagcg

SEQ ID NO: 11128 - DNA, 25 bp, Artificial Sequence
  Synthetic Oligonucleotide
tatctacccgtgacacacccactgg

SEQ ID NO: 11129 - DNA, 25 bp, Artificial Sequence
  Synthetic Oligonucleotide
tatcccggagagtacgagtcacagg

SEQ ID NO: 11130 - DNA, 25 bp, Artificial Sequence
  Synthetic Oligonucleotide
cacgccggtaggtgttcgacgaacg

SEQ ID NO: 11131 - DNA, 25 bp, Artificial Sequence
  Synthetic Oligonucleotide
ggccgcgtacgtgcagttcgagtgg

SEQ ID NO: 11132 - DNA, 25 bp, Artificial Sequence
  Synthetic Oligonucleotide
gcatcagccggtatcatgcaggtag

SEQ ID NO: 11133 - DNA, 25 bp, Artificial Sequence
  Synthetic Oligonucleotide
acattaggcggtatcatgctggtag

SEQ ID NO: 11134 - DNA, 25 bp, Artificial Sequence
  Synthetic Oligonucleotide
aaagagggtcttcactgcaccgacg

SEQ ID NO: 11135 - DNA, 25 bp, Artificial Sequence
  Synthetic Oligonucleotide
accggtggtcatcctagcgccgtcg

SEQ ID NO: 11136 - DNA, 25 bp, Artificial Sequence
  Synthetic Oligonucleotide
ccgcttgtcgagccgacgcggctag

SEQ ID NO: 11137 - DNA, 25 bp, Artificial Sequence
  Synthetic Oligonucleotide
gagcgggtgtagacgccgttctacg

SEQ ID NO: 11138 - DNA, 25 bp, Artificial Sequence
  Synthetic Oligonucleotide
aagtggaggtagacgcagacgaacg

SEQ ID NO: 11139 - DNA, 25 bp, Artificial Sequence
  Synthetic Oligonucleotide
gaatacgtggacatggattataaag

SEQ ID NO: 11140 - DNA, 25 bp, Artificial Sequence
  Synthetic Oligonucleotide
gaaaggtcgcttatattcagagacg

SEQ ID NO: 11141 - DNA, 25 bp, Artificial Sequence
  Synthetic Oligonucleotide
aaatggccgcttgtagttagagacg

SEQ ID NO: 11142 - DNA, 25 bp, Artificial Sequence
  Synthetic Oligonucleotide
gaatggccgtttgtactctgcgacg

SEQ ID NO: 11143 - DNA, 25 bp, Artificial Sequence
  Synthetic Oligonucleotide
gaacggccgcttgtactctgcgacg

SEQ ID NO: 11144 - DNA, 25 bp, Artificial Sequence
  Synthetic Oligonucleotide
tgaaagttatcttgcgtcgctccct

SEQ ID NO: 11145 - DNA, 25 bp, Artificial Sequence
  Synthetic Oligonucleotide
gaagagtgttgctgcgcccgtcgct

SEQ ID NO: 11146 - DNA, 25 bp, Artificial Sequence
  Synthetic Oligonucleotide
agaaaaagtctatgaccccgtcgag

SEQ ID NO: 11147 - DNA, 25 bp, Artificial Sequence
  Synthetic Oligonucleotide
gacgaagaaagctgcctcccgacag

SEQ ID NO: 11148 - DNA, 25 bp, Artificial Sequence
  Synthetic Oligonucleotide
gggatgacgccctgccgttcgcctg

SEQ ID NO: 11149 - DNA, 25 bp, Artificial Sequence
  Synthetic Oligonucleotide
ggctgacccacttcctgtcgcatag

SEQ ID NO: 11150 - DNA, 25 bp, Artificial Sequence
  Synthetic Oligonucleotide
gctagagccgccttggtacgcagag

SEQ ID NO: 11151 - DNA, 25 bp, Artificial Sequence
  Synthetic Oligonucleotide
aacgaacggccgattctagtcagag

SEQ ID NO: 11152 - DNA, 25 bp, Artificial Sequence
  Synthetic Oligonucleotide
taaacgagaccagtttctagggtag

SEQ ID NO: 11153 - DNA, 25 bp, Artificial Sequence
  Synthetic Oligonucleotide
ctaaaggtaacttctgttcgaaggg

SEQ ID NO: 11154 - DNA, 25 bp, Artificial Sequence
  Synthetic Oligonucleotide
tacatgtgtaatttttgtcacacag

SEQ ID NO: 11155 - DNA, 25 bp, Artificial Sequence
  Synthetic Oligonucleotide
tcgcatttaaccatgctgcactcat

SEQ ID NO: 11156 - DNA, 25 bp, Artificial Sequence
  Synthetic Oligonucleotide
taggcgcctttgtcaagcccttcat

SEQ ID NO: 11157 - DNA, 25 bp, Artificial Sequence
  Synthetic Oligonucleotide
gtcctttgttaacaccgagtatcct

SEQ ID NO: 11158 - DNA, 25 bp, Artificial Sequence
  Synthetic Oligonucleotide
gtccattcgggagcgacggaggtgg

SEQ ID NO: 11159 - DNA, 25 bp, Artificial Sequence
  Synthetic Oligonucleotide
tctcattggtgctagtgagttctag

SEQ ID NO: 11160 - DNA, 25 bp, Artificial Sequence
  Synthetic Oligonucleotide
tacatctcgggtgacaggtgccgag

SEQ ID NO: 11161 - DNA, 25 bp, Artificial Sequence
  Synthetic Oligonucleotide
tctatcccggttacggtgtccttag

SEQ ID NO: 11162 - DNA, 25 bp, Artificial Sequence
  Synthetic Oligonucleotide
tttagtcacggatacttgtgacttg

SEQ ID NO: 11163 - DNA, 25 bp, Artificial Sequence
  Synthetic Oligonucleotide
tcttttaacggtgttttgacatacg

SEQ ID NO: 11164 - DNA, 25 bp, Artificial Sequence
  Synthetic Oligonucleotide
gttattttacatgcttcaggagatg

SEQ ID NO: 11165 - DNA, 25 bp, Artificial Sequence
  Synthetic Oligonucleotide
gtggattaatccaccgcacgactcg

SEQ ID NO: 11166 - DNA, 25 bp, Artificial Sequence
  Synthetic Oligonucleotide
aactgtaatagcaaccacagactcg

SEQ ID NO: 11167 - DNA, 25 bp, Artificial Sequence
  Synthetic Oligonucleotide
ccatgaaataacaaccatgtactgt

SEQ ID NO: 11168 - DNA, 25 bp, Artificial Sequence
  Synthetic Oligonucleotide
gaaagaaagaccacctcgttactag

SEQ ID NO: 11169 - DNA, 25 bp, Artificial Sequence
  Synthetic Oligonucleotide
ccaactaaaccgaggacgtctactg

SEQ ID NO: 11170 - DNA, 25 bp, Artificial Sequence
  Synthetic Oligonucleotide
tctcaacgtaaagggaaacctgagt

SEQ ID NO: 11171 - DNA, 25 bp, Artificial Sequence
  Synthetic Oligonucleotide
atcagagtaccttcgggcggctgag

SEQ ID NO: 11172 - DNA, 25 bp, Artificial Sequence
  Synthetic Oligonucleotide
aacaggtatcgatggagggtcttag

SEQ ID NO: 11173 - DNA, 25 bp, Artificial Sequence
  Synthetic Oligonucleotide
gaaaacgcgaagacggacgcgtaag

SEQ ID NO: 11174 - DNA, 25 bp, Artificial Sequence
  Synthetic Oligonucleotide
catatttctcaagacggacgcagag

SEQ ID NO: 11175 - DNA, 25 bp, Artificial Sequence
  Synthetic Oligonucleotide
tatttgcctaataacggctctgtag

SEQ ID NO: 11176 - DNA, 25 bp, Artificial Sequence
  Synthetic Oligonucleotide
cagtccccgagaggacggatttacg

SEQ ID NO: 11177 - DNA, 25 bp, Artificial Sequence
  Synthetic Oligonucleotide
gacacaggacgacgctcatctgtcg

SEQ ID NO: 11178 - DNA, 25 bp, Artificial Sequence
  Synthetic Oligonucleotide
ggagacaaacctgctctgtctgacg

SEQ ID NO: 11179 - DNA, 25 bp, Artificial Sequence
  Synthetic Oligonucleotide
acaacagtaactgtcgttacggtcg

SEQ ID NO: 11180 - DNA, 25 bp, Artificial Sequence
  Synthetic Oligonucleotide
cgaagagttctggtcgtcactctag

SEQ ID NO: 11181 - DNA, 25 bp, Artificial Sequence
  Synthetic Oligonucleotide
accagaagtccgacgcgacctcgag

SEQ ID NO: 11182 - DNA, 25 bp, Artificial Sequence
  Synthetic Oligonucleotide
gcgagacagcggctccgacctcacg

SEQ ID NO: 11183 - DNA, 25 bp, Artificial Sequence
  Synthetic Oligonucleotide
gctagactgcggagtcgacgtccag

SEQ ID NO: 11184 - DNA, 25 bp, Artificial Sequence
  Synthetic Oligonucleotide
ttagatcgtcggaagtcgttctcat

SEQ ID NO: 11185 - DNA, 25 bp, Artificial Sequence
  Synthetic Oligonucleotide
tttaaatcgtgcaagtcgtgttcag

SEQ ID NO: 11186 - DNA, 25 bp, Artificial Sequence
  Synthetic Oligonucleotide
tgtcccatcgaaaagttgtccgacg

SEQ ID NO: 11187 - DNA, 25 bp, Artificial Sequence
  Synthetic Oligonucleotide
ccttcgaccgaacagttctgctcgt

SEQ ID NO: 11188 - DNA, 25 bp, Artificial Sequence
  Synthetic Oligonucleotide
cccttcgaccgatgagttctgctcg

SEQ ID NO: 11189 - DNA, 25 bp, Artificial Sequence
  Synthetic Oligonucleotide
acctgtccagtgccggctactctcg

SEQ ID NO: 11190 - DNA, 25 bp, Artificial Sequence
  Synthetic Oligonucleotide
aaaactgtcggatgcctcccttagt

SEQ ID NO: 11191 - DNA, 25 bp, Artificial Sequence
  Synthetic Oligonucleotide
caaaactgtcggtagcctcccttag

SEQ ID NO: 11192 - DNA, 25 bp, Artificial Sequence
  Synthetic Oligonucleotide
acctacgtagtgtccctcacacaag

SEQ ID NO: 11193 - DNA, 25 bp, Artificial Sequence
  Synthetic Oligonucleotide
acggtagatcggaccgtcagaactg

SEQ ID NO: 11194 - DNA, 25 bp, Artificial Sequence
  Synthetic Oligonucleotide
accagacgtcagtaccgcaggctcg

SEQ ID NO: 11195 - DNA, 25 bp, Artificial Sequence
  Synthetic Oligonucleotide
cgaggtacgtctcaccgcaggtgtg

SEQ ID NO: 11196 - DNA, 25 bp, Artificial Sequence
  Synthetic Oligonucleotide
gctcttgcctcgactcgagcgcgtg

SEQ ID NO: 11197 - DNA, 25 bp, Artificial Sequence
  Synthetic Oligonucleotide
cgagaatggccggttcggtagagtg

SEQ ID NO: 11198 - DNA, 25 bp, Artificial Sequence
  Synthetic Oligonucleotide
ataagtcgagccgtaccagtgactg

SEQ ID NO: 11199 - DNA, 25 bp, Artificial Sequence
  Synthetic Oligonucleotide
gaacgcgagtccacctcgttactag

SEQ ID NO: 11200 - DNA, 25 bp, Artificial Sequence
  Synthetic Oligonucleotide
gcagcggtctcacctcgtgctacgg

SEQ ID NO: 11201 - DNA, 25 bp, Artificial Sequence
  Synthetic Oligonucleotide
catcgttcgtaagcacggacacggt

SEQ ID NO: 11202 - DNA, 25 bp, Artificial Sequence
  Synthetic Oligonucleotide
actgttctagctgacgtaaccgtcg

SEQ ID NO: 11203 - DNA, 25 bp, Artificial Sequence
  Synthetic Oligonucleotide
gagttgttaacacccgcgtaacatg

SEQ ID NO: 11204 - DNA, 25 bp, Artificial Sequence
  Synthetic Oligonucleotide
ggacgggtcgaacacttagaaccag

SEQ ID NO: 11205 - DNA, 25 bp, Artificial Sequence
  Synthetic Oligonucleotide
ggggcgattcaaccaatggcctacg

SEQ ID NO: 11206 - DNA, 25 bp, Artificial Sequence
  Synthetic Oligonucleotide
gggtcattctcacaagtgtttctag

SEQ ID NO: 11207 - DNA, 25 bp, Artificial Sequence
  Synthetic Oligonucleotide
tagtcttttacatcacagtttcctg

SEQ ID NO: 11208 - DNA, 25 bp, Artificial Sequence
  Synthetic Oligonucleotide
atccttctcggcagtagcttcctag

SEQ ID NO: 11209 - DNA, 25 bp, Artificial Sequence
  Synthetic Oligonucleotide
taccttacgtaacaagacttcctcg

SEQ ID NO: 11210 - DNA, 25 bp, Artificial Sequence
  Synthetic Oligonucleotide
acgcttacgactctactcattgctg

SEQ ID NO: 11211 - DNA, 25 bp, Artificial Sequence
  Synthetic Oligonucleotide
acgagtatcacaggccgacgggctg

SEQ ID NO: 11212 - DNA, 25 bp, Artificial Sequence
  Synthetic Oligonucleotide
aggtagtgttaccggcaccatgctg

SEQ ID NO: 11213 - DNA, 25 bp, Artificial Sequence
  Synthetic Oligonucleotide
ggtagtgtttgttcccccgtagtcg

SEQ ID NO: 11214 - DNA, 25 bp, Artificial Sequence
  Synthetic Oligonucleotide
ggttcggtgtttcaaacccgtgagt

SEQ ID NO: 11215 - DNA, 25 bp, Artificial Sequence
  Synthetic Oligonucleotide
gtataggtgtgagaaccgaaggact

SEQ ID NO: 11216 - DNA, 25 bp, Artificial Sequence
  Synthetic Oligonucleotide
actacgtgtagagcgggaccaaggg

SEQ ID NO: 11217 - DNA, 25 bp, Artificial Sequence
  Synthetic Oligonucleotide
gaccgggtccgatgtcccggtctcg

SEQ ID NO: 11218 - DNA, 25 bp, Artificial Sequence
  Synthetic Oligonucleotide
cagcagttctacgatggcaagtcct

SEQ ID NO: 11219 - DNA, 25 bp, Artificial Sequence
  Synthetic Oligonucleotide
aggacttgccatcgtagaactgctg

SEQ ID NO: 11220 - DNA, 25 bp, Artificial Sequence
  Synthetic Oligonucleotide
tgttgaacggccttccaggtagctg

SEQ ID NO: 11221 - DNA, 25 bp, Artificial Sequence
  Synthetic Oligonucleotide
cttatagagggttcaccaggacggg

SEQ ID NO: 11222 - DNA, 25 bp, Artificial Sequence
  Synthetic Oligonucleotide
cactaaagagtgtctaccttgcctg

SEQ ID NO: 11223 - DNA, 25 bp, Artificial Sequence
  Synthetic Oligonucleotide
taaaaagttaacttcttctaactcg

SEQ ID NO: 11224 - DNA, 25 bp, Artificial Sequence
  Synthetic Oligonucleotide
aaatgacttacatgctttagtcacg

SEQ ID NO: 11225 - DNA, 25 bp, Artificial Sequence
  Synthetic Oligonucleotide
caatcgtttcgagccacgaagtcag

SEQ ID NO: 11226 - DNA, 25 bp, Artificial Sequence
  Synthetic Oligonucleotide
aggacttgccatcgtagaactgctg

SEQ ID NO: 11227 - DNA, 25 bp, Artificial Sequence
  Synthetic Oligonucleotide
cagcagttctacgatggcaagtcct

SEQ ID NO: 11228 - DNA, 25 bp, Artificial Sequence
  Synthetic Oligonucleotide
aagtccgacgatttctactgcgtcg

SEQ ID NO: 11229 - DNA, 25 bp, Artificial Sequence
  Synthetic Oligonucleotide
ttaaggtacacatcgccactttacg

SEQ ID NO: 11230 - DNA, 25 bp, Artificial Sequence
  Synthetic Oligonucleotide
ttaaggtacacatcgccactttacg

SEQ ID NO: 11231 - DNA, 25 bp, Artificial Sequence
  Synthetic Oligonucleotide
ttaaaggacacatcgccactttacg

SEQ ID NO: 11232 - DNA, 25 bp, Artificial Sequence
  Synthetic Oligonucleotide
aaaaagagtaacgtagcccgttatg

SEQ ID NO: 11233 - DNA, 25 bp, Artificial Sequence
  Synthetic Oligonucleotide
acgtaaatggtatggatcatatttg

SEQ ID NO: 11234 - DNA, 25 bp, Artificial Sequence
  Synthetic Oligonucleotide
aaatggagtattttgactatgctcg

SEQ ID NO: 11235 - DNA, 25 bp, Artificial Sequence
  Synthetic Oligonucleotide
tggtgggtatcttagttctttctcg

SEQ ID NO: 11236 - DNA, 25 bp, Artificial Sequence
  Synthetic Oligonucleotide
tggtgggtatcttagttctttctcg

SEQ ID NO: 11237 - DNA, 25 bp, Artificial Sequence
  Synthetic Oligonucleotide
tggtgggtatcttagttctttctcg

SEQ ID NO: 11238 - DNA, 25 bp, Artificial Sequence
  Synthetic Oligonucleotide
tggtgggtatcttagttctttctcg

SEQ ID NO: 11239 - DNA, 25 bp, Artificial Sequence
  Synthetic Oligonucleotide
tggtgggtatcttagttctttctcg

SEQ ID NO: 11240 - DNA, 25 bp, Artificial Sequence
  Synthetic Oligonucleotide
caggtgcgattagttctttgtcgtt

SEQ ID NO: 11241 - DNA, 25 bp, Artificial Sequence
  Synthetic Oligonucleotide
gtgggtgttttagttctttctcgag

SEQ ID NO: 11242 - DNA, 25 bp, Artificial Sequence
  Synthetic Oligonucleotide
ggagtcgcttaagttcgtttcacag

SEQ ID NO: 11243 - DNA, 25 bp, Artificial Sequence
  Synthetic Oligonucleotide
cctaccgctgaacttgttctaacag

SEQ ID NO: 11244 - DNA, 25 bp, Artificial Sequence
  Synthetic Oligonucleotide
catcggtgcgagccagtcctagaag

SEQ ID NO: 11245 - DNA, 25 bp, Artificial Sequence
  Synthetic Oligonucleotide
gcaagtcgctgacaagctaaagtag

SEQ ID NO: 11246 - DNA, 25 bp, Artificial Sequence
  Synthetic Oligonucleotide
gacctagtcccttaagaacaaacag

SEQ ID NO: 11247 - DNA, 25 bp, Artificial Sequence
  Synthetic Oligonucleotide
atcgattagcaaacgatcattacag

SEQ ID NO: 11248 - DNA, 25 bp, Artificial Sequence
  Synthetic Oligonucleotide
aggacttgccatcgtagaactgctg

SEQ ID NO: 11249 - DNA, 25 bp, Artificial Sequence
  Synthetic Oligonucleotide
cagcagttctacgatggcaagtcct

SEQ ID NO: 11250 - DNA, 25 bp, Artificial Sequence
  Synthetic Oligonucleotide
gtgcataatttcggtgtagtatatg

SEQ ID NO: 11251 - DNA, 25 bp, Artificial Sequence
  Synthetic Oligonucleotide
gaactagacttcagcgatgtaatcg

SEQ ID NO: 11252 - DNA, 25 bp, Artificial Sequence
  Synthetic Oligonucleotide
agaaagacttacaacattagacggt

SEQ ID NO: 11253 - DNA, 25 bp, Artificial Sequence
  Synthetic Oligonucleotide
ggaaagaatcgcatacctggacggt

SEQ ID NO: 11254 - DNA, 25 bp, Artificial Sequence
  Synthetic Oligonucleotide
tgttttaacataacatacctgttgg

SEQ ID NO: 11255 - DNA, 25 bp, Artificial Sequence
  Synthetic Oligonucleotide
attgatcaatcgtacggtctcagag

SEQ ID NO: 11256 - DNA, 25 bp, Artificial Sequence
  Synthetic Oligonucleotide
ccggtacggtcactcgaagggcaag

SEQ ID NO: 11257 - DNA, 25 bp, Artificial Sequence
  Synthetic Oligonucleotide
tcctgtgacgcaaccgaaggcatgg

SEQ ID NO: 11258 - DNA, 25 bp, Artificial Sequence
  Synthetic Oligonucleotide
cctgacaccagtactcaggaaggtg

SEQ ID NO: 11259 - DNA, 25 bp, Artificial Sequence
  Synthetic Oligonucleotide
gtacgtccagttcgagtggcgctag

SEQ ID NO: 11260 - DNA, 25 bp, Artificial Sequence
  Synthetic Oligonucleotide
gtacgtggcttcgacgccgtcgctg

SEQ ID NO: 11261 - DNA, 25 bp, Artificial Sequence
  Synthetic Oligonucleotide
gggctgacgtgaccgactcgactcg

SEQ ID NO: 11262 - DNA, 25 bp, Artificial Sequence
  Synthetic Oligonucleotide
gtcgtcgtcgaggtaccgactcctg

SEQ ID NO: 11263 - DNA, 25 bp, Artificial Sequence
  Synthetic Oligonucleotide
tagtctctctagatcctctcgacag

SEQ ID NO: 11264 - DNA, 25 bp, Artificial Sequence
  Synthetic Oligonucleotide
tagctttacgaccgctacgtggacg

SEQ ID NO: 11265 - DNA, 25 bp, Artificial Sequence
  Synthetic Oligonucleotide
atgtgctttcgttacgatagtggag

SEQ ID NO: 11266 - DNA, 25 bp, Artificial Sequence
  Synthetic Oligonucleotide
catctgtctcttttaccaagtagag

SEQ ID NO: 11267 - DNA, 25 bp, Artificial Sequence
  Synthetic Oligonucleotide
gacttgtacaggtagtccaagaacg

SEQ ID NO: 11268 - DNA, 25 bp, Artificial Sequence
  Synthetic Oligonucleotide
tgacggtgcaggtgttgtagtcggg

SEQ ID NO: 11269 - DNA, 25 bp, Artificial Sequence
  Synthetic Oligonucleotide
gagatcgccgcgttatgcttacggg

SEQ ID NO: 11270 - DNA, 25 bp, Artificial Sequence
  Synthetic Oligonucleotide
aggacttgccatcgtagaactgctg

SEQ ID NO: 11271 - DNA, 25 bp, Artificial Sequence
  Synthetic Oligonucleotide
cagcagttctacgatggcaagtcct

SEQ ID NO: 11272 - DNA, 25 bp, Artificial Sequence
  Synthetic Oligonucleotide
aaggaagtcctaaacacgatgagag

SEQ ID NO: 11273 - DNA, 25 bp, Artificial Sequence
  Synthetic Oligonucleotide
gccgaaggaatttgccacctcgatg

SEQ ID NO: 11274 - DNA, 25 bp, Artificial Sequence
  Synthetic Oligonucleotide
ccgatggaattctctcagtatcaat

SEQ ID NO: 11275 - DNA, 25 bp, Artificial Sequence
  Synthetic Oligonucleotide
ggtaatatctacctaccgtatccag

SEQ ID NO: 11276 - DNA, 25 bp, Artificial Sequence
  Synthetic Oligonucleotide
gggaactacgtccaccgtaccgaag

SEQ ID NO: 11277 - DNA, 25 bp, Artificial Sequence
  Synthetic Oligonucleotide
ggggtacgaaccgacactccagtag

SEQ ID NO: 11278 - DNA, 25 bp, Artificial Sequence
  Synthetic Oligonucleotide
ggtacggaaaccgctagtggactag

SEQ ID NO: 11279 - DNA, 25 bp, Artificial Sequence
  Synthetic Oligonucleotide
cgcgaaatactatccgttaaagaag

SEQ ID NO: 11280 - DNA, 25 bp, Artificial Sequence
  Synthetic Oligonucleotide
accgcgtgaactaatatttgcaaat

SEQ ID NO: 11281 - DNA, 25 bp, Artificial Sequence
  Synthetic Oligonucleotide
ccgtggattaatcctccgcacgact

SEQ ID NO: 11282 - DNA, 25 bp, Artificial Sequence
  Synthetic Oligonucleotide
tcaataggttcatcctctcctcgct

SEQ ID NO: 11283 - DNA, 25 bp, Artificial Sequence
  Synthetic Oligonucleotide
atgaacttgttctacgacttttgct

SEQ ID NO: 11284 - DNA, 25 bp, Artificial Sequence
  Synthetic Oligonucleotide
catgcactctatagaaattgggact

SEQ ID NO: 11285 - DNA, 25 bp, Artificial Sequence
  Synthetic Oligonucleotide
cgcaccagtcgtcaaacgttggcat

SEQ ID NO: 11286 - DNA, 25 bp, Artificial Sequence
  Synthetic Oligonucleotide
gcgagaccaggcagaacgcggccag

SEQ ID NO: 11287 - DNA, 25 bp, Artificial Sequence
  Synthetic Oligonucleotide
gcacctcgcagcagaggccgcttag

SEQ ID NO: 11288 - DNA, 25 bp, Artificial Sequence
  Synthetic Oligonucleotide
gcgccgtcgcggaggcgaacattag

SEQ ID NO: 11289 - DNA, 25 bp, Artificial Sequence
  Synthetic Oligonucleotide
gccggtccgcggaggttcaagatct

SEQ ID NO: 11290 - DNA, 25 bp, Artificial Sequence
  Synthetic Oligonucleotide
gttgagcccgtggcttccatggtct

SEQ ID NO: 11291 - DNA, 25 bp, Artificial Sequence
  Synthetic Oligonucleotide
tgctgcacttgcgttacgcaaggct

SEQ ID NO: 11292 - DNA, 25 bp, Artificial Sequence
  Synthetic Oligonucleotide
aggacttgccatcgtagaactgctg

SEQ ID NO: 11293 - DNA, 25 bp, Artificial Sequence
  Synthetic Oligonucleotide
cagcagttctacgatggcaagtcct

SEQ ID NO: 11294 - DNA, 25 bp, Artificial Sequence
  Synthetic Oligonucleotide
agcacgattggtcgcagacctgttg

SEQ ID NO: 11295 - DNA, 25 bp, Artificial Sequence
  Synthetic Oligonucleotide
acgccatttatgcggacgcgcctgt

SEQ ID NO: 11296 - DNA, 25 bp, Artificial Sequence
  Synthetic Oligonucleotide
cctcatgaaagaaagacctcctcgt

SEQ ID NO: 11297 - DNA, 25 bp, Artificial Sequence
  Synthetic Oligonucleotide
acctcaagtaccctaaaggatcctg

SEQ ID NO: 11298 - DNA, 25 bp, Artificial Sequence
  Synthetic Oligonucleotide
gcccagggcatgaacggctgctacg

SEQ ID NO: 11299 - DNA, 25 bp, Artificial Sequence
  Synthetic Oligonucleotide
ccaaggtgacggtacgtgctacaag

SEQ ID NO: 11300 - DNA, 25 bp, Artificial Sequence
  Synthetic Oligonucleotide
actagcgtagaggccgggtcactag

SEQ ID NO: 11301 - DNA, 25 bp, Artificial Sequence
  Synthetic Oligonucleotide
gtagcggagactgacggtcccgtag

SEQ ID NO: 11302 - DNA, 25 bp, Artificial Sequence
  Synthetic Oligonucleotide
tctgttcgagatctgtcatcgtacg

SEQ ID NO: 11303 - DNA, 25 bp, Artificial Sequence
  Synthetic Oligonucleotide
gttttgtacaggtctgagtcgtact

SEQ ID NO: 11304 - DNA, 25 bp, Artificial Sequence
  Synthetic Oligonucleotide
cggttaattacaaggttgacttcgt

SEQ ID NO: 11305 - DNA, 25 bp, Artificial Sequence
  Synthetic Oligonucleotide
tcctctttcatggtactgacttacg

SEQ ID NO: 11306 - DNA, 25 bp, Artificial Sequence
  Synthetic Oligonucleotide
cgatccggtttttaggttgtcttag

SEQ ID NO: 11307 - DNA, 25 bp, Artificial Sequence
  Synthetic Oligonucleotide
tcgactccgatgttccaatcttttg

SEQ ID NO: 11308 - DNA, 25 bp, Artificial Sequence
  Synthetic Oligonucleotide
gacttgatgacaccccatagtttag

SEQ ID NO: 11309 - DNA, 25 bp, Artificial Sequence
  Synthetic Oligonucleotide
taacatctttcacaccacggtttag

SEQ ID NO: 11310 - DNA, 25 bp, Artificial Sequence
  Synthetic Oligonucleotide
attacttttgtagaaaccgtttacg

SEQ ID NO: 11311 - DNA, 25 bp, Artificial Sequence
  Synthetic Oligonucleotide
attacttttgtaagaaccgtttacg

SEQ ID NO: 11312 - DNA, 25 bp, Artificial Sequence
  Synthetic Oligonucleotide
cgtaactttcggtaaacctaccgct

SEQ ID NO: 11313 - DNA, 25 bp, Artificial Sequence
  Synthetic Oligonucleotide
ccagaccctacctttaacactccct

SEQ ID NO: 11314 - DNA, 25 bp, Artificial Sequence
  Synthetic Oligonucleotide
aggacttgccatcgtagaactgctg

SEQ ID NO: 11315 - DNA, 25 bp, Artificial Sequence
  Synthetic Oligonucleotide
cagcagttctacgatggcaagtcct

SEQ ID NO: 11316 - DNA, 25 bp, Artificial Sequence
  Synthetic Oligonucleotide
aataggtggtgttacgtcggctacg

SEQ ID NO: 11317 - DNA, 25 bp, Artificial Sequence
  Synthetic Oligonucleotide
atagacgcggattatacgcccgacg

SEQ ID NO: 11318 - DNA, 25 bp, Artificial Sequence
  Synthetic Oligonucleotide
aaacggtcgtaaacgtacaccaacg

SEQ ID NO: 11319 - DNA, 25 bp, Artificial Sequence
  Synthetic Oligonucleotide
accaacactcggtggtacaccaacg

SEQ ID NO: 11320 - DNA, 25 bp, Artificial Sequence
  Synthetic Oligonucleotide
caacaacttcgatggtacaccaacg

SEQ ID NO: 11321 - DNA, 25 bp, Artificial Sequence
  Synthetic Oligonucleotide
gctcgaacttcgccggcaccggtag

SEQ ID NO: 11322 - DNA, 25 bp, Artificial Sequence
  Synthetic Oligonucleotide
ccaaacctcgcgtcgaacgtcgtgt

SEQ ID NO: 11323 - DNA, 25 bp, Artificial Sequence
  Synthetic Oligonucleotide
ctggagccgtcgaaacggacgtctg

SEQ ID NO: 11324 - DNA, 25 bp, Artificial Sequence
  Synthetic Oligonucleotide
gagtagcatgaggacgaacgactag

SEQ ID NO: 11325 - DNA, 25 bp, Artificial Sequence
  Synthetic Oligonucleotide
gagtcctcctcgttactagaactag

SEQ ID NO: 11326 - DNA, 25 bp, Artificial Sequence
  Synthetic Oligonucleotide
gagtcctcctcgttactagaactag

SEQ ID NO: 11327 - DNA, 25 bp, Artificial Sequence
  Synthetic Oligonucleotide
caacatcttccatactacggtctag

SEQ ID NO: 11328 - DNA, 25 bp, Artificial Sequence
  Synthetic Oligonucleotide
cactctgtccacgacgtaccgacag

SEQ ID NO: 11329 - DNA, 25 bp, Artificial Sequence
  Synthetic Oligonucleotide
cctttagtcttagacccgtaccaag

SEQ ID NO: 11330 - DNA, 25 bp, Artificial Sequence
  Synthetic Oligonucleotide
ctttgtcgtaacgacagtgaaccag

SEQ ID NO: 11331 - DNA, 25 bp, Artificial Sequence
  Synthetic Oligonucleotide
aatcgtcatacaacaggtcgaccag

SEQ ID NO: 11332 - DNA, 25 bp, Artificial Sequence
  Synthetic Oligonucleotide
taaactctctcttaggtgcacctag

SEQ ID NO: 11333 - DNA, 25 bp, Artificial Sequence
  Synthetic Oligonucleotide
gccgcttctagttggagacgaccag

SEQ ID NO: 11334 - DNA, 25 bp, Artificial Sequence
  Synthetic Oligonucleotide
gtcgcttctactctgcgacgaccag

SEQ ID NO: 11335 - DNA, 25 bp, Artificial Sequence
  Synthetic Oligonucleotide
gccgtttctactctgcgacgaccag

SEQ ID NO: 11336 - DNA, 25 bp, Artificial Sequence
  Synthetic Oligonucleotide
aggacttgccatcgtagaactgctg

SEQ ID NO: 11337 - DNA, 25 bp, Artificial Sequence
  Synthetic Oligonucleotide
cagcagttctacgatggcaagtcct

SEQ ID NO: 11338 - DNA, 25 bp, Artificial Sequence
  Synthetic Oligonucleotide
acagagtcagggtcacaccggctag

SEQ ID NO: 11339 - DNA, 25 bp, Artificial Sequence
  Synthetic Oligonucleotide
agtaaggtgggttctaactgcctag

SEQ ID NO: 11340 - DNA, 25 bp, Artificial Sequence
  Synthetic Oligonucleotide
agagagggttgtacaagtcgaccag

SEQ ID NO: 11341 - DNA, 25 bp, Artificial Sequence
  Synthetic Oligonucleotide
ggtcgagcgtggtcaagaagtcgat

SEQ ID NO: 11342 - DNA, 25 bp, Artificial Sequence
  Synthetic Oligonucleotide
cgcgtggtaacggggacaaagtgat

SEQ ID NO: 11343 - DNA, 25 bp, Artificial Sequence
  Synthetic Oligonucleotide
aaagggagtgccatgaccaagtgat

SEQ ID NO: 11344 - DNA, 25 bp, Artificial Sequence
  Synthetic Oligonucleotide
aggacttgccatcgtagaactgctg

SEQ ID NO: 11345 - DNA, 25 bp, Artificial Sequence
  Synthetic Oligonucleotide
cagcagttctacgatggcaagtcct

SEQ ID NO: 11346 - DNA, 25 bp, Artificial Sequence
  Synthetic Oligonucleotide
tgttgaacggccatccaggtagctg

SEQ ID NO: 11347 - DNA, 25 bp, Artificial Sequence
  Synthetic Oligonucleotide
cttatagagggtacaccaggacggg

SEQ ID NO: 11348 - DNA, 25 bp, Artificial Sequence
  Synthetic Oligonucleotide
cactaaagagtgactaccttgcctg

SEQ ID NO: 11349 - DNA, 25 bp, Artificial Sequence
  Synthetic Oligonucleotide
taaaaagttaacatcttctaactcg

SEQ ID NO: 11350 - DNA, 25 bp, Artificial Sequence
  Synthetic Oligonucleotide
aaatgacttacaagctttagtcacg

SEQ ID NO: 11351 - DNA, 25 bp, Artificial Sequence
  Synthetic Oligonucleotide
caatcgtttcgacccacgaagtcag

SEQ ID NO: 11352 - DNA, 25 bp, Artificial Sequence
  Synthetic Oligonucleotide
cagcagttctacgatggcaagtcct

SEQ ID NO: 11353 - DNA, 25 bp, Artificial Sequence
  Synthetic Oligonucleotide
aggacttgccatcgtagaactgctg

SEQ ID NO: 11354 - DNA, 25 bp, Artificial Sequence
  Synthetic Oligonucleotide
aagtccgacgatatctactgcgtcg

SEQ ID NO: 11355 - DNA, 25 bp, Artificial Sequence
  Synthetic Oligonucleotide
ttaaggtacacaacgccactttacg

SEQ ID NO: 11356 - DNA, 25 bp, Artificial Sequence
  Synthetic Oligonucleotide
ttaaggtacacaacgccactttacg

SEQ ID NO: 11357 - DNA, 25 bp, Artificial Sequence
  Synthetic Oligonucleotide
ttaaaggacacaacgccactttacg

SEQ ID NO: 11358 - DNA, 25 bp, Artificial Sequence
  Synthetic Oligonucleotide
aaaaagagtaacctagcccgttatg

SEQ ID NO: 11359 - DNA, 25 bp, Artificial Sequence
  Synthetic Oligonucleotide
acgtaaatggtaaggatcatatttg

SEQ ID NO: 11360 - DNA, 25 bp, Artificial Sequence
  Synthetic Oligonucleotide
aaatggagtattatgactatgctcg

SEQ ID NO: 11361 - DNA, 25 bp, Artificial Sequence
  Synthetic Oligonucleotide
tggtgggtatctaagttctttctcg

SEQ ID NO: 11362 - DNA, 25 bp, Artificial Sequence
  Synthetic Oligonucleotide
tggtgggtatctaagttctttctcg

SEQ ID NO: 11363 - DNA, 25 bp, Artificial Sequence
  Synthetic Oligonucleotide
tggtgggtatctaagttctttctcg

SEQ ID NO: 11364 - DNA, 25 bp, Artificial Sequence
  Synthetic Oligonucleotide
tggtgggtatctaagttctttctcg

SEQ ID NO: 11365 - DNA, 25 bp, Artificial Sequence
  Synthetic Oligonucleotide
tggtgggtatctaagttctttctcg

SEQ ID NO: 11366 - DNA, 25 bp, Artificial Sequence
  Synthetic Oligonucleotide
caggtgcgattacttctttgtcgtt

SEQ ID NO: 11367 - DNA, 25 bp, Artificial Sequence
  Synthetic Oligonucleotide
gtgggtgttttacttctttctcgag

SEQ ID NO: 11368 - DNA, 25 bp, Artificial Sequence
  Synthetic Oligonucleotide
ggagtcgcttaacttcgtttcacag

SEQ ID NO: 11369 - DNA, 25 bp, Artificial Sequence
  Synthetic Oligonucleotide
cctaccgctgaagttgttctaacag

SEQ ID NO: 11370 - DNA, 25 bp, Artificial Sequence
  Synthetic Oligonucleotide
catcggtgcgaggcagtcctagaag

SEQ ID NO: 11371 - DNA, 25 bp, Artificial Sequence
  Synthetic Oligonucleotide
gcaagtcgctgagaagctaaagtag

SEQ ID NO: 11372 - DNA, 25 bp, Artificial Sequence
  Synthetic Oligonucleotide
gacctagtccctaaagaacaaacag

SEQ ID NO: 11373 - DNA, 25 bp, Artificial Sequence
  Synthetic Oligonucleotide
atcgattagcaatcgatcattacag

SEQ ID NO: 11374 - DNA, 25 bp, Artificial Sequence
  Synthetic Oligonucleotide
cagcagttctacgatggcaagtcct

SEQ ID NO: 11375 - DNA, 25 bp, Artificial Sequence
  Synthetic Oligonucleotide
aggacttgccatcgtagaactgctg

SEQ ID NO: 11376 - DNA, 25 bp, Artificial Sequence
  Synthetic Oligonucleotide
gtgcataatttccgtgtagtatatg

SEQ ID NO: 11377 - DNA, 25 bp, Artificial Sequence
  Synthetic Oligonucleotide
gaactagacttctgcgatgtaatcg

SEQ ID NO: 11378 - DNA, 25 bp, Artificial Sequence
  Synthetic Oligonucleotide
agaaagacttactacattagacggt

SEQ ID NO: 11379 - DNA, 25 bp, Artificial Sequence
  Synthetic Oligonucleotide
ggaaagaatcgcttacctggacggt

SEQ ID NO: 11380 - DNA, 25 bp, Artificial Sequence
  Synthetic Oligonucleotide
tgttttaacatatcatacctgttgg

SEQ ID NO: 11381 - DNA, 25 bp, Artificial Sequence
  Synthetic Oligonucleotide
attgatcaatcgaacggtctcagag

SEQ ID NO: 11382 - DNA, 25 bp, Artificial Sequence
  Synthetic Oligonucleotide
ccggtacggtcagtcgaagggcaag

SEQ ID NO: 11383 - DNA, 25 bp, Artificial Sequence
  Synthetic Oligonucleotide
tcctgtgacgcatccgaaggcatgg

SEQ ID NO: 11384 - DNA, 25 bp, Artificial Sequence
  Synthetic Oligonucleotide
cctgacaccagttctcaggaaggtg

SEQ ID NO: 11385 - DNA, 25 bp, Artificial Sequence
  Synthetic Oligonucleotide
gtacgtccagttggagtggcgctag

SEQ ID NO: 11386 - DNA, 25 bp, Artificial Sequence
  Synthetic Oligonucleotide
gtacgtggcttccacgccgtcgctg

SEQ ID NO: 11387 - DNA, 25 bp, Artificial Sequence
  Synthetic Oligonucleotide
gggctgacgtgagcgactcgactcg

SEQ ID NO: 11388 - DNA, 25 bp, Artificial Sequence
  Synthetic Oligonucleotide
gtcgtcgtcgagctaccgactcctg

SEQ ID NO: 11389 - DNA, 25 bp, Artificial Sequence
  Synthetic Oligonucleotide
tagtctctctagttcctctcgacag

SEQ ID NO: 11390 - DNA, 25 bp, Artificial Sequence
  Synthetic Oligonucleotide
tagctttacgacggctacgtggacg

SEQ ID NO: 11391 - DNA, 25 bp, Artificial Sequence
  Synthetic Oligonucleotide
atgtgctttcgtaacgatagtggag

SEQ ID NO: 11392 - DNA, 25 bp, Artificial Sequence
  Synthetic Oligonucleotide
catctgtctcttataccaagtagag

SEQ ID NO: 11393 - DNA, 25 bp, Artificial Sequence
  Synthetic Oligonucleotide
gacttgtacaggaagtccaagaacg

SEQ ID NO: 11394 - DNA, 25 bp, Artificial Sequence
  Synthetic Oligonucleotide
tgacggtgcaggagttgtagtcggg

SEQ ID NO: 11395 - DNA, 25 bp, Artificial Sequence
  Synthetic Oligonucleotide
gagatcgccgcgatatgcttacggg

SEQ ID NO: 11396 - DNA, 25 bp, Artificial Sequence
  Synthetic Oligonucleotide
cagcagttctacgatggcaagtcct

SEQ ID NO: 11397 - DNA, 25 bp, Artificial Sequence
  Synthetic Oligonucleotide
aggacttgccatcgtagaactgctg

SEQ ID NO: 11398 - DNA, 25 bp, Artificial Sequence
  Synthetic Oligonucleotide
aaggaagtcctatacacgatgagag

SEQ ID NO: 11399 - DNA, 25 bp, Artificial Sequence
  Synthetic Oligonucleotide
gccgaaggaattagccacctcgatg

SEQ ID NO: 11400 - DNA, 25 bp, Artificial Sequence
  Synthetic Oligonucleotide
ccgatggaattcactcagtatcaat

SEQ ID NO: 11401 - DNA, 25 bp, Artificial Sequence
  Synthetic Oligonucleotide
ggtaatatctacgtaccgtatccag

SEQ ID NO: 11402 - DNA, 25 bp, Artificial Sequence
  Synthetic Oligonucleotide
gggaactacgtcgaccgtaccgaag

SEQ ID NO: 11403 - DNA, 25 bp, Artificial Sequence
  Synthetic Oligonucleotide
ggggtacgaacccacactccagtag

SEQ ID NO: 11404 - DNA, 25 bp, Artificial Sequence
  Synthetic Oligonucleotide
ggtacggaaacccctagtggactag

SEQ ID NO: 11405 - DNA, 25 bp, Artificial Sequence
  Synthetic Oligonucleotide
cgcgaaatactaaccgttaaagaag

SEQ ID NO: 11406 - DNA, 25 bp, Artificial Sequence
  Synthetic Oligonucleotide
accgcgtgaacttatatttgcaaat

SEQ ID NO: 11407 - DNA, 25 bp, Artificial Sequence
  Synthetic Oligonucleotide
ccgtggattaatgctccgcacgact

SEQ ID NO: 11408 - DNA, 25 bp, Artificial Sequence
  Synthetic Oligonucleotide
tcaataggttcaacctctcctcgct

SEQ ID NO: 11409 - DNA, 25 bp, Artificial Sequence
  Synthetic Oligonucleotide
atgaacttgttcaacgacttttgct

SEQ ID NO: 11410 - DNA, 25 bp, Artificial Sequence
  Synthetic Oligonucleotide
catgcactctattgaaattgggact

SEQ ID NO: 11411 - DNA, 25 bp, Artificial Sequence
  Synthetic Oligonucleotide
cgcaccagtcgtgaaacgttggcat

SEQ ID NO: 11412 - DNA, 25 bp, Artificial Sequence
  Synthetic Oligonucleotide
gcgagaccaggctgaacgcggccag

SEQ ID NO: 11413 - DNA, 25 bp, Artificial Sequence
  Synthetic Oligonucleotide
gcacctcgcagctgaggccgcttag

SEQ ID NO: 11414 - DNA, 25 bp, Artificial Sequence
  Synthetic Oligonucleotide
gcgccgtcgcggtggcgaacattag

SEQ ID NO: 11415 - DNA, 25 bp, Artificial Sequence
  Synthetic Oligonucleotide
gccggtccgcggtggttcaagatct

SEQ ID NO: 11416 - DNA, 25 bp, Artificial Sequence
  Synthetic Oligonucleotide
gttgagcccgtgccttccatggtct

SEQ ID NO: 11417 - DNA, 25 bp, Artificial Sequence
  Synthetic Oligonucleotide
tgctgcacttgccttacgcaaggct

SEQ ID NO: 11418 - DNA, 25 bp, Artificial Sequence
  Synthetic Oligonucleotide
cagcagttctacgatggcaagtcct

SEQ ID NO: 11419 - DNA, 25 bp, Artificial Sequence
  Synthetic Oligonucleotide
aggacttgccatcgtagaactgctg

SEQ ID NO: 11420 - DNA, 25 bp, Artificial Sequence
  Synthetic Oligonucleotide
agcacgattggtggcagacctgttg

SEQ ID NO: 11421 - DNA, 25 bp, Artificial Sequence
  Synthetic Oligonucleotide
acgccatttatggggacgcgcctgt

SEQ ID NO: 11422 - DNA, 25 bp, Artificial Sequence
  Synthetic Oligonucleotide
cctcatgaaagatagacctcctcgt

SEQ ID NO: 11423 - DNA, 25 bp, Artificial Sequence
  Synthetic Oligonucleotide
acctcaagtaccgtaaaggatcctg

SEQ ID NO: 11424 - DNA, 25 bp, Artificial Sequence
  Synthetic Oligonucleotide
gcccagggcatgtacggctgctacg

SEQ ID NO: 11425 - DNA, 25 bp, Artificial Sequence
  Synthetic Oligonucleotide
ccaaggtgacggaacgtgctacaag

SEQ ID NO: 11426 - DNA, 25 bp, Artificial Sequence
  Synthetic Oligonucleotide
actagcgtagagcccgggtcactag

SEQ ID NO: 11427 - DNA, 25 bp, Artificial Sequence
  Synthetic Oligonucleotide
gtagcggagactcacggtcccgtag

SEQ ID NO: 11428 - DNA, 25 bp, Artificial Sequence
  Synthetic Oligonucleotide
tctgttcgagatgtgtcatcgtacg

SEQ ID NO: 11429 - DNA, 25 bp, Artificial Sequence
  Synthetic Oligonucleotide
gttttgtacaggactgagtcgtact

SEQ ID NO: 11430 - DNA, 25 bp, Artificial Sequence
  Synthetic Oligonucleotide
cggttaattacatggttgacttcgt

SEQ ID NO: 11431 - DNA, 25 bp, Artificial Sequence
  Synthetic Oligonucleotide
tcctctttcatgctactgacttacg

SEQ ID NO: 11432 - DNA, 25 bp, Artificial Sequence
  Synthetic Oligonucleotide
cgatccggttttaaggttgtcttag

SEQ ID NO: 11433 - DNA, 25 bp, Artificial Sequence
  Synthetic Oligonucleotide
tcgactccgatgatccaatcttttg

SEQ ID NO: 11434 - DNA, 25 bp, Artificial Sequence
  Synthetic Oligonucleotide
gacttgatgacagcccatagtttag

SEQ ID NO: 11435 - DNA, 25 bp, Artificial Sequence
  Synthetic Oligonucleotide
taacatctttcagaccacggtttag

SEQ ID NO: 11436 - DNA, 25 bp, Artificial Sequence
  Synthetic Oligonucleotide
attacttttgtacaaaccgtttacg

SEQ ID NO: 11437 - DNA, 25 bp, Artificial Sequence
  Synthetic Oligonucleotide
attacttttgtatgaaccgtttacg

SEQ ID NO: 11438 - DNA, 25 bp, Artificial Sequence
  Synthetic Oligonucleotide
cgtaactttcggaaaacctaccgct

SEQ ID NO: 11439 - DNA, 25 bp, Artificial Sequence
  Synthetic Oligonucleotide
ccagaccctaccattaacactccct

SEQ ID NO: 11440 - DNA, 25 bp, Artificial Sequence
  Synthetic Oligonucleotide
cagcagttctacgatggcaagtcct

SEQ ID NO: 11441 - DNA, 25 bp, Artificial Sequence
  Synthetic Oligonucleotide
aggacttgccatcgtagaactgctg

SEQ ID NO: 11442 - DNA, 25 bp, Artificial Sequence
  Synthetic Oligonucleotide
aataggtggtgtaacgtcggctacg

SEQ ID NO: 11443 - DNA, 25 bp, Artificial Sequence
  Synthetic Oligonucleotide
atagacgcggataatacgcccgacg

SEQ ID NO: 11444 - DNA, 25 bp, Artificial Sequence
  Synthetic Oligonucleotide
aaacggtcgtaatcgtacaccaacg

SEQ ID NO: 11445 - DNA, 25 bp, Artificial Sequence
  Synthetic Oligonucleotide
accaacactcggaggtacaccaacg

SEQ ID NO: 11446 - DNA, 25 bp, Artificial Sequence
  Synthetic Oligonucleotide
caacaacttcgaaggtacaccaacg

SEQ ID NO: 11447 - DNA, 25 bp, Artificial Sequence
  Synthetic Oligonucleotide
gctcgaacttcggcggcaccggtag

SEQ ID NO: 11448 - DNA, 25 bp, Artificial Sequence
  Synthetic Oligonucleotide
ccaaacctcgcgacgaacgtcgtgt

SEQ ID NO: 11449 - DNA, 25 bp, Artificial Sequence
  Synthetic Oligonucleotide
ctggagccgtcgtaacggacgtctg

SEQ ID NO: 11450 - DNA, 25 bp, Artificial Sequence
  Synthetic Oligonucleotide
gagtagcatgagcacgaacgactag

SEQ ID NO: 11451 - DNA, 25 bp, Artificial Sequence
  Synthetic Oligonucleotide
gagtcctcctcgatactagaactag

SEQ ID NO: 11452 - DNA, 25 bp, Artificial Sequence
  Synthetic Oligonucleotide
gagtcctcctcgatactagaactag

SEQ ID NO: 11453 - DNA, 25 bp, Artificial Sequence
  Synthetic Oligonucleotide
caacatcttccaaactacggtctag

SEQ ID NO: 11454 - DNA, 25 bp, Artificial Sequence
  Synthetic Oligonucleotide
cactctgtccaccacgtaccgacag

SEQ ID NO: 11455 - DNA, 25 bp, Artificial Sequence
  Synthetic Oligonucleotide
cctttagtcttacacccgtaccaag

SEQ ID NO: 11456 - DNA, 25 bp, Artificial Sequence
  Synthetic Oligonucleotide
ctttgtcgtaaccacagtgaaccag

SEQ ID NO: 11457 - DNA, 25 bp, Artificial Sequence
  Synthetic Oligonucleotide
aatcgtcatacatcaggtcgaccag

SEQ ID NO: 11458 - DNA, 25 bp, Artificial Sequence
  Synthetic Oligonucleotide
taaactctctctaaggtgcacctag

SEQ ID NO: 11459 - DNA, 25 bp, Artificial Sequence
  Synthetic Oligonucleotide
gccgcttctagtaggagacgaccag

SEQ ID NO: 11460 - DNA, 25 bp, Artificial Sequence
  Synthetic Oligonucleotide
gtcgcttctactgtgcgacgaccag

SEQ ID NO: 11461 - DNA, 25 bp, Artificial Sequence
  Synthetic Oligonucleotide
gccgtttctactgtgcgacgaccag

SEQ ID NO: 11462 - DNA, 25 bp, Artificial Sequence
  Synthetic Oligonucleotide
cagcagttctacgatggcaagtcct

SEQ ID NO: 11463 - DNA, 25 bp, Artificial Sequence
  Synthetic Oligonucleotide
aggacttgccatcgtagaactgctg

SEQ ID NO: 11464 - DNA, 25 bp, Artificial Sequence
  Synthetic Oligonucleotide
acagagtcagggacacaccggctag

SEQ ID NO: 11465 - DNA, 25 bp, Artificial Sequence
  Synthetic Oligonucleotide
agtaaggtgggtactaactgcctag

SEQ ID NO: 11466 - DNA, 25 bp, Artificial Sequence
  Synthetic Oligonucleotide
agagagggttgttcaagtcgaccag

SEQ ID NO: 11467 - DNA, 25 bp, Artificial Sequence
  Synthetic Oligonucleotide
ggtcgagcgtggacaagaagtcgat

SEQ ID NO: 11468 - DNA, 25 bp, Artificial Sequence
  Synthetic Oligonucleotide
cgcgtggtaacgcggacaaagtgat

SEQ ID NO: 11469 - DNA, 25 bp, Artificial Sequence
  Synthetic Oligonucleotide
aaagggagtgccttgaccaagtgat

SEQ ID NO: 11470 - DNA, 25 bp, Artificial Sequence
  Synthetic Oligonucleotide
cagcagttctacgatggcaagtcct

SEQ ID NO: 11471 - DNA, 25 bp, Artificial Sequence
  Synthetic Oligonucleotide
aggacttgccatcgtagaactgctg

SEQ ID NO: 11472 - DNA, 25 bp, Artificial Sequence
  Synthetic Oligonucleotide
tcagtaaaggcgacggtagtagtat

SEQ ID NO: 11473 - DNA, 25 bp, Artificial Sequence
  Synthetic Oligonucleotide
tcgagtaggggccacgggacgtact

SEQ ID NO: 11474 - DNA, 25 bp, Artificial Sequence
  Synthetic Oligonucleotide
actgcaagggcggtcaccgccgagt

SEQ ID NO: 11475 - DNA, 25 bp, Artificial Sequence
  Synthetic Oligonucleotide
cagatataaggtcggtctccctaat

SEQ ID NO: 11476 - DNA, 25 bp, Artificial Sequence
  Synthetic Oligonucleotide
ctaaaagacgttcggtcccctagag

SEQ ID NO: 11477 - DNA, 25 bp, Artificial Sequence
  Synthetic Oligonucleotide
taaaagatgaccggtcgaaactcag

SEQ ID NO: 11478 - DNA, 25 bp, Artificial Sequence
  Synthetic Oligonucleotide
agaagtactcactcagacactctag

SEQ ID NO: 11479 - DNA, 25 bp, Artificial Sequence
  Synthetic Oligonucleotide
gaagtactcactcagacactctagg

SEQ ID NO: 11480 - DNA, 25 bp, Artificial Sequence
  Synthetic Oligonucleotide
ttgtaacagctatcatagacttgag

SEQ ID NO: 11481 - DNA, 25 bp, Artificial Sequence
  Synthetic Oligonucleotide
ctactgaacgcgaatgatccttaag

SEQ ID NO: 11482 - DNA, 25 bp, Artificial Sequence
  Synthetic Oligonucleotide
gtctatgaactggtaagccacattg

SEQ ID NO: 11483 - DNA, 25 bp, Artificial Sequence
  Synthetic Oligonucleotide
gttaaatatcgtatacgccaccttg

SEQ ID NO: 11484 - DNA, 25 bp, Artificial Sequence
  Synthetic Oligonucleotide
ttagaagtaccacctgcctcggttg

SEQ ID NO: 11485 - DNA, 25 bp, Artificial Sequence
  Synthetic Oligonucleotide
aataaagttcaaatctactcgatgg

SEQ ID NO: 11486 - DNA, 25 bp, Artificial Sequence
  Synthetic Oligonucleotide
aacaccacttgctatctacctggtg

SEQ ID NO: 11487 - DNA, 25 bp, Artificial Sequence
  Synthetic Oligonucleotide
agaaactaactctattacctgtgag

SEQ ID NO: 11488 - DNA, 25 bp, Artificial Sequence
  Synthetic Oligonucleotide
agacaactagaccaccctagggaag

SEQ ID NO: 11489 - DNA, 25 bp, Artificial Sequence
  Synthetic Oligonucleotide
aagtcagaagactaccgcctgaaat

SEQ ID NO: 11490 - DNA, 25 bp, Artificial Sequence
  Synthetic Oligonucleotide
gtcagaggtaaaggaccagtatcag

SEQ ID NO: 11491 - DNA, 25 bp, Artificial Sequence
  Synthetic Oligonucleotide
cgagtggtagaagagcttgtcgacg

SEQ ID NO: 11492 - DNA, 25 bp, Artificial Sequence
  Synthetic Oligonucleotide
cgagaggtggagttctcattagcag

SEQ ID NO: 11493 - DNA, 25 bp, Artificial Sequence
  Synthetic Oligonucleotide
caagctaatagactcaatacacgag

SEQ ID NO: 11494 - DNA, 25 bp, Artificial Sequence
  Synthetic Oligonucleotide
gcacacctaatgactgatctcttag

SEQ ID NO: 11495 - DNA, 25 bp, Artificial Sequence
  Synthetic Oligonucleotide
cccgtcctggtgaaccctctataag

SEQ ID NO: 11496 - DNA, 25 bp, Artificial Sequence
  Synthetic Oligonucleotide
ctatcacgggaggtacccgcttcag

SEQ ID NO: 11497 - DNA, 25 bp, Artificial Sequence
  Synthetic Oligonucleotide
acttacgcggtacacaccgcatcag

SEQ ID NO: 11498 - DNA, 25 bp, Artificial Sequence
  Synthetic Oligonucleotide
ttcttaccctcaacgacaacttcag

SEQ ID NO: 11499 - DNA, 25 bp, Artificial Sequence
  Synthetic Oligonucleotide
ttgtagaggtcagcagactttacag

SEQ ID NO: 11500 - DNA, 25 bp, Artificial Sequence
  Synthetic Oligonucleotide
tgcggaccgctagggacttgtacag

SEQ ID NO: 11501 - DNA, 25 bp, Artificial Sequence
  Synthetic Oligonucleotide
tcgcgagatggtgactcgatttagg

SEQ ID NO: 11502 - DNA, 25 bp, Artificial Sequence
  Synthetic Oligonucleotide
ttatgaacttgttctacgacttttg

SEQ ID NO: 11503 - DNA, 25 bp, Artificial Sequence
  Synthetic Oligonucleotide
tgtctgcgaaattctaacttaactg

SEQ ID NO: 11504 - DNA, 25 bp, Artificial Sequence
  Synthetic Oligonucleotide
tgtactgtcgaactcgctcaaaagg

SEQ ID NO: 11505 - DNA, 25 bp, Artificial Sequence
  Synthetic Oligonucleotide
tacgacatcgttcttcaataagagg

SEQ ID NO: 11506 - DNA, 25 bp, Artificial Sequence
  Synthetic Oligonucleotide
ttgtatcttcttcgtcttaatgggg

SEQ ID NO: 11507 - DNA, 25 bp, Artificial Sequence
  Synthetic Oligonucleotide
ttggtttacttctcaactaaggaag

SEQ ID NO: 11508 - DNA, 25 bp, Artificial Sequence
  Synthetic Oligonucleotide
ctgttctacttctcatctgagaaag

SEQ ID NO: 11509 - DNA, 25 bp, Artificial Sequence
  Synthetic Oligonucleotide
ttgttctacattccatctgagaaag

SEQ ID NO: 11510 - DNA, 25 bp, Artificial Sequence
  Synthetic Oligonucleotide
tatcttcctcctctctggagaaacg

SEQ ID NO: 11511 - DNA, 25 bp, Artificial Sequence
  Synthetic Oligonucleotide
gaaattcttactttccttgtggaag

SEQ ID NO: 11512 - DNA, 25 bp, Artificial Sequence
  Synthetic Oligonucleotide
tatcttctattagcgcttgtagaag

SEQ ID NO: 11513 - DNA, 25 bp, Artificial Sequence
  Synthetic Oligonucleotide
catcttccacaccacggtctagaag

SEQ ID NO: 11514 - DNA, 25 bp, Artificial Sequence
  Synthetic Oligonucleotide
catcttccacaccacggtctagaag

SEQ ID NO: 11515 - DNA, 25 bp, Artificial Sequence
  Synthetic Oligonucleotide
catcttccacaccacggtctagaag

SEQ ID NO: 11516 - DNA, 25 bp, Artificial Sequence
  Synthetic Oligonucleotide
tcctgttccacatcttctagtcgag

SEQ ID NO: 11517 - DNA, 25 bp, Artificial Sequence
  Synthetic Oligonucleotide
gccacttcaacacctatctgtagag

SEQ ID NO: 11518 - DNA, 25 bp, Artificial Sequence
  Synthetic Oligonucleotide
gaaccgctctctaaacccttgtaag

SEQ ID NO: 11519 - DNA, 25 bp, Artificial Sequence
  Synthetic Oligonucleotide
gactctcgtccgacgacccatgaag

SEQ ID NO: 11520 - DNA, 25 bp, Artificial Sequence
  Synthetic Oligonucleotide
tagcttctcgcgtaagcctagggag

SEQ ID NO: 11521 - DNA, 25 bp, Artificial Sequence
  Synthetic Oligonucleotide
tggtctctcccgtaaacgctgaggg

SEQ ID NO: 11522 - DNA, 25 bp, Artificial Sequence
  Synthetic Oligonucleotide
tgtcgccttcaccataacatgcagg

SEQ ID NO: 11523 - DNA, 25 bp, Artificial Sequence
  Synthetic Oligonucleotide
cttgctcttcaccacagacaaaagg

SEQ ID NO: 11524 - DNA, 25 bp, Artificial Sequence
  Synthetic Oligonucleotide
ccgtgccaacctcagtagcaaaagg

SEQ ID NO: 11525 - DNA, 25 bp, Artificial Sequence
  Synthetic Oligonucleotide
cgggccacaacaaagacctaaaggt

SEQ ID NO: 11526 - DNA, 25 bp, Artificial Sequence
  Synthetic Oligonucleotide
ggtcgaacattacagaactttatat

SEQ ID NO: 11527 - DNA, 25 bp, Artificial Sequence
  Synthetic Oligonucleotide
tcgcgacagaaactggacttagaat

SEQ ID NO: 11528 - DNA, 25 bp, Artificial Sequence
  Synthetic Oligonucleotide
gtcgaaaaaatcagcgctatcgaag

SEQ ID NO: 11529 - DNA, 25 bp, Artificial Sequence
  Synthetic Oligonucleotide
accagaaataagaacatcttcgatg

SEQ ID NO: 11530 - DNA, 25 bp, Artificial Sequence
  Synthetic Oligonucleotide
catcaataagcctagtagtcgatgt

SEQ ID NO: 11531 - DNA, 25 bp, Artificial Sequence
  Synthetic Oligonucleotide
ctctcgagaacaacccagtcgaaag

SEQ ID NO: 11532 - DNA, 25 bp, Artificial Sequence
  Synthetic Oligonucleotide
ctacagcagtataaaccgtcgaaag

SEQ ID NO: 11533 - DNA, 25 bp, Artificial Sequence
  Synthetic Oligonucleotide
cgtccctactacaagacccgacggg

SEQ ID NO: 11534 - DNA, 25 bp, Artificial Sequence
  Synthetic Oligonucleotide
ctacgtccagaccatgcacggcggg

SEQ ID NO: 11535 - DNA, 25 bp, Artificial Sequence
  Synthetic Oligonucleotide
gacgtctaagtccatgcccaagtag

SEQ ID NO: 11536 - DNA, 25 bp, Artificial Sequence
  Synthetic Oligonucleotide
gtacgcatttgaaccgcggagatag

SEQ ID NO: 11537 - DNA, 25 bp, Artificial Sequence
  Synthetic Oligonucleotide
gaagactttcgactcgggtagcacg

SEQ ID NO: 11538 - DNA, 25 bp, Artificial Sequence
  Synthetic Oligonucleotide
aaggactgtgtctgcgttggtccag

SEQ ID NO: 11539 - DNA, 25 bp, Artificial Sequence
  Synthetic Oligonucleotide
ataccaagtcgctgcggtgttcctg

SEQ ID NO: 11540 - DNA, 25 bp, Artificial Sequence
  Synthetic Oligonucleotide
gccaccggtcgctgcagtgcttgtg

SEQ ID NO: 11541 - DNA, 25 bp, Artificial Sequence
  Synthetic Oligonucleotide
cgtccaacgaggtcgttgcgatttt

SEQ ID NO: 11542 - DNA, 25 bp, Artificial Sequence
  Synthetic Oligonucleotide
attaaaatgaccatgtcagagttat

SEQ ID NO: 11543 - DNA, 25 bp, Artificial Sequence
  Synthetic Oligonucleotide
tctatccctggcttgacagagtgct

SEQ ID NO: 11544 - DNA, 25 bp, Artificial Sequence
  Synthetic Oligonucleotide
ctactcttccttttgacagcggtct

SEQ ID NO: 11545 - DNA, 25 bp, Artificial Sequence
  Synthetic Oligonucleotide
tgttttcacgttttgtacaggtctg

SEQ ID NO: 11546 - DNA, 25 bp, Artificial Sequence
  Synthetic Oligonucleotide
gttctaatgacgtataaacttcttg

SEQ ID NO: 11547 - DNA, 25 bp, Artificial Sequence
  Synthetic Oligonucleotide
ttttattgtaggaacaacgattatg

SEQ ID NO: 11548 - DNA, 25 bp, Artificial Sequence
  Synthetic Oligonucleotide
attcaattatggaacgacaaaactg

SEQ ID NO: 11549 - DNA, 25 bp, Artificial Sequence
  Synthetic Oligonucleotide
tatcaaaaaggaactacagtgcctg

SEQ ID NO: 11550 - DNA, 25 bp, Artificial Sequence
  Synthetic Oligonucleotide
tcacagtgacaatttcagtctcctg

SEQ ID NO: 11551 - DNA, 25 bp, Artificial Sequence
  Synthetic Oligonucleotide
actacaggggagattgaggtacctg

SEQ ID NO: 11552 - DNA, 25 bp, Artificial Sequence
  Synthetic Oligonucleotide
cccctatgggaggaacaggacctag

SEQ ID NO: 11553 - DNA, 25 bp, Artificial Sequence
  Synthetic Oligonucleotide
cccctacgggaggaacaggacctag

SEQ ID NO: 11554 - DNA, 25 bp, Artificial Sequence
  Synthetic Oligonucleotide
cccctacgggaggaacaggacctag

SEQ ID NO: 11555 - DNA, 25 bp, Artificial Sequence
  Synthetic Oligonucleotide
cccttacgggaggaacaggacctag

SEQ ID NO: 11556 - DNA, 25 bp, Artificial Sequence
  Synthetic Oligonucleotide
gtcttagacccgtaccaagacctag

SEQ ID NO: 11557 - DNA, 25 bp, Artificial Sequence
  Synthetic Oligonucleotide
atagacgcgctatccactggagtag

SEQ ID NO: 11558 - DNA, 25 bp, Artificial Sequence
  Synthetic Oligonucleotide
catgaggacgaacgactaggtgtag

SEQ ID NO: 11559 - DNA, 25 bp, Artificial Sequence
  Synthetic Oligonucleotide
tcccctagagggagacctaggcgag

SEQ ID NO: 11560 - DNA, 25 bp, Artificial Sequence
  Synthetic Oligonucleotide
tcacctcgccgaagggcctgaacgg

SEQ ID NO: 11561 - DNA, 25 bp, Artificial Sequence
  Synthetic Oligonucleotide
tcaacttccaccagagcacctatgg

SEQ ID NO: 11562 - DNA, 25 bp, Artificial Sequence
  Synthetic Oligonucleotide
tcaacattcttcagagcacctaagg

SEQ ID NO: 11563 - DNA, 25 bp, Artificial Sequence
  Synthetic Oligonucleotide
gactctttttacaagaacctgaacg

SEQ ID NO: 11564 - DNA, 25 bp, Artificial Sequence
  Synthetic Oligonucleotide
cctcggtatttaaagcacacctaat

SEQ ID NO: 11565 - DNA, 25 bp, Artificial Sequence
  Synthetic Oligonucleotide
gcctagcatttcgagacaacattct

SEQ ID NO: 11566 - DNA, 25 bp, Artificial Sequence
  Synthetic Oligonucleotide
agctcgttatgcggacgaaacttgt

SEQ ID NO: 11567 - DNA, 25 bp, Artificial Sequence
  Synthetic Oligonucleotide
gcgaagtttgtcgtctaggtcgttg

SEQ ID NO: 11568 - DNA, 25 bp, Artificial Sequence
  Synthetic Oligonucleotide
agacattatttcaactagcgttgtg

SEQ ID NO: 11569 - DNA, 25 bp, Artificial Sequence
  Synthetic Oligonucleotide
agaatcgttgtaaatctacctttag

SEQ ID NO: 11570 - DNA, 25 bp, Artificial Sequence
  Synthetic Oligonucleotide
ggacagttgtattaaccttctttag

SEQ ID NO: 11571 - DNA, 25 bp, Artificial Sequence
  Synthetic Oligonucleotide
ggactatagacaaaacttgaccaag

SEQ ID NO: 11572 - DNA, 25 bp, Artificial Sequence
  Synthetic Oligonucleotide
cataagtcaccgtacttcgccaagt

SEQ ID NO: 11573 - DNA, 25 bp, Artificial Sequence
  Synthetic Oligonucleotide
caagacacgtccggcttcgaccttg

SEQ ID NO: 11574 - DNA, 25 bp, Artificial Sequence
  Synthetic Oligonucleotide
aacgacactcctgcaaaccgtgtag

SEQ ID NO: 11575 - DNA, 25 bp, Artificial Sequence
  Synthetic Oligonucleotide
ccacgtcctccgtaacgactgttag

SEQ ID NO: 11576 - DNA, 25 bp, Artificial Sequence
  Synthetic Oligonucleotide
agtaccacgtcgaatagctacttag

SEQ ID NO: 11577 - DNA, 25 bp, Artificial Sequence
  Synthetic Oligonucleotide
agacacaccgtcactaccgtacttg

SEQ ID NO: 11578 - DNA, 25 bp, Artificial Sequence
  Synthetic Oligonucleotide
tcgtaaccacggacacggttactag

SEQ ID NO: 11579 - DNA, 25 bp, Artificial Sequence
  Synthetic Oligonucleotide
attaagacactgaacgctgttacag

SEQ ID NO: 11580 - DNA, 25 bp, Artificial Sequence
  Synthetic Oligonucleotide
tccccagtaactaccgctgttacag

SEQ ID NO: 11581 - DNA, 25 bp, Artificial Sequence
  Synthetic Oligonucleotide
tccccagtaactaccgctgttatag

SEQ ID NO: 11582 - DNA, 25 bp, Artificial Sequence
  Synthetic Oligonucleotide
tttcagaactgcttctagacgtaag

SEQ ID NO: 11583 - DNA, 25 bp, Artificial Sequence
  Synthetic Oligonucleotide
ctgatcgctataagcttctaataag

SEQ ID NO: 11584 - DNA, 25 bp, Artificial Sequence
  Synthetic Oligonucleotide
ctaatgacgtataaacttcttgttg

SEQ ID NO: 11585 - DNA, 25 bp, Artificial Sequence
  Synthetic Oligonucleotide
caagcaatagcgttaattcgtctgt

SEQ ID NO: 11586 - DNA, 25 bp, Artificial Sequence
  Synthetic Oligonucleotide
acgtcgaatagctacttaggtccgt

SEQ ID NO: 11587 - DNA, 25 bp, Artificial Sequence
  Synthetic Oligonucleotide
cactccagtagggtctgtacctcag

SEQ ID NO: 11588 - DNA, 25 bp, Artificial Sequence
  Synthetic Oligonucleotide
ccactatcagaaaggtcactctcag

SEQ ID NO: 11589 - DNA, 25 bp, Artificial Sequence
  Synthetic Oligonucleotide
cccgcttgagcaacaactacttcgg

SEQ ID NO: 11590 - DNA, 25 bp, Artificial Sequence
  Synthetic Oligonucleotide
acagcagggtcaaccactgctacgg

SEQ ID NO: 11591 - DNA, 25 bp, Artificial Sequence
  Synthetic Oligonucleotide
ctagccggtgtgaccctgactctgt

SEQ ID NO: 11592 - DNA, 25 bp, Artificial Sequence
  Synthetic Oligonucleotide
gagccgcgtgtttcacaacgaccag

SEQ ID NO: 11593 - DNA, 25 bp, Artificial Sequence
  Synthetic Oligonucleotide
ggttagacgttttcactttcacagt

SEQ ID NO: 11594 - DNA, 25 bp, Artificial Sequence
  Synthetic Oligonucleotide
ggttagacctattcaatatagcagt

SEQ ID NO: 11595 - DNA, 25 bp, Artificial Sequence
  Synthetic Oligonucleotide
cgcggttaggccttcagccagcagt

SEQ ID NO: 11596 - DNA, 25 bp, Artificial Sequence
  Synthetic Oligonucleotide
aggacttgccatcgtagaactgctg

SEQ ID NO: 11597 - DNA, 25 bp, Artificial Sequence
  Synthetic Oligonucleotide
cagcagttctacgatggcaagtcct

SEQ ID NO: 11598 - DNA, 25 bp, Artificial Sequence
  Synthetic Oligonucleotide
tcagtaaaggcgtcggtagtagtat

SEQ ID NO: 11599 - DNA, 25 bp, Artificial Sequence
  Synthetic Oligonucleotide
tcgagtaggggcgacgggacgtact

SEQ ID NO: 11600 - DNA, 25 bp, Artificial Sequence
  Synthetic Oligonucleotide
actgcaagggcgctcaccgccgagt

SEQ ID NO: 11601 - DNA, 25 bp, Artificial Sequence
  Synthetic Oligonucleotide
cagatataaggtgggtctccctaat

SEQ ID NO: 11602 - DNA, 25 bp, Artificial Sequence
  Synthetic Oligonucleotide
ctaaaagacgttgggtcccctagag

SEQ ID NO: 11603 - DNA, 25 bp, Artificial Sequence
  Synthetic Oligonucleotide
taaaagatgacccgtcgaaactcag

SEQ ID NO: 11604 - DNA, 25 bp, Artificial Sequence
  Synthetic Oligonucleotide
agaagtactcacacagacactctag

SEQ ID NO: 11605 - DNA, 25 bp, Artificial Sequence
  Synthetic Oligonucleotide
gaagtactcactgagacactctagg

SEQ ID NO: 11606 - DNA, 25 bp, Artificial Sequence
  Synthetic Oligonucleotide
ttgtaacagctaacatagacttgag

SEQ ID NO: 11607 - DNA, 25 bp, Artificial Sequence
  Synthetic Oligonucleotide
ctactgaacgcgtatgatccttaag

SEQ ID NO: 11608 - DNA, 25 bp, Artificial Sequence
  Synthetic Oligonucleotide
gtctatgaactgctaagccacattg

SEQ ID NO: 11609 - DNA, 25 bp, Artificial Sequence
  Synthetic Oligonucleotide
gttaaatatcgtttacgccaccttg

SEQ ID NO: 11610 - DNA, 25 bp, Artificial Sequence
  Synthetic Oligonucleotide
ttagaagtaccagctgcctcggttg

SEQ ID NO: 11611 - DNA, 25 bp, Artificial Sequence
  Synthetic Oligonucleotide
aataaagttcaattctactcgatgg

SEQ ID NO: 11612 - DNA, 25 bp, Artificial Sequence
  Synthetic Oligonucleotide
aacaccacttgcaatctacctggtg

SEQ ID NO: 11613 - DNA, 25 bp, Artificial Sequence
  Synthetic Oligonucleotide
agaaactaactcaattacctgtgag

SEQ ID NO: 11614 - DNA, 25 bp, Artificial Sequence
  Synthetic Oligonucleotide
agacaactagacgaccctagggaag

SEQ ID NO: 11615 - DNA, 25 bp, Artificial Sequence
  Synthetic Oligonucleotide
aagtcagaagacaaccgcctgaaat

SEQ ID NO: 11616 - DNA, 25 bp, Artificial Sequence
  Synthetic Oligonucleotide
gtcagaggtaaacgaccagtatcag

SEQ ID NO: 11617 - DNA, 25 bp, Artificial Sequence
  Synthetic Oligonucleotide
cgagtggtagaacagcttgtcgacg

SEQ ID NO: 11618 - DNA, 25 bp, Artificial Sequence
  Synthetic Oligonucleotide
cgagaggtggagatctcattagcag

SEQ ID NO: 11619 - DNA, 25 bp, Artificial Sequence
  Synthetic Oligonucleotide
caagctaatagagtcaatacacgag

SEQ ID NO: 11620 - DNA, 25 bp, Artificial Sequence
  Synthetic Oligonucleotide
gcacacctaatgtctgatctcttag

SEQ ID NO: 11621 - DNA, 25 bp, Artificial Sequence
  Synthetic Oligonucleotide
cccgtcctggtgtaccctctataag

SEQ ID NO: 11622 - DNA, 25 bp, Artificial Sequence
  Synthetic Oligonucleotide
ctatcacgggagctacccgcttcag

SEQ ID NO: 11623 - DNA, 25 bp, Artificial Sequence
  Synthetic Oligonucleotide
acttacgcggtagacaccgcatcag

SEQ ID NO: 11624 - DNA, 25 bp, Artificial Sequence
  Synthetic Oligonucleotide
ttcttaccctcatcgacaacttcag

SEQ ID NO: 11625 - DNA, 25 bp, Artificial Sequence
  Synthetic Oligonucleotide
ttgtagaggtcaccagactttacag

SEQ ID NO: 11626 - DNA, 25 bp, Artificial Sequence
  Synthetic Oligonucleotide
tgcggaccgctacggacttgtacag

SEQ ID NO: 11627 - DNA, 25 bp, Artificial Sequence
  Synthetic Oligonucleotide
tcgcgagatggtcactcgatttagg

SEQ ID NO: 11628 - DNA, 25 bp, Artificial Sequence
  Synthetic Oligonucleotide
ttatgaacttgtactacgacttttg

SEQ ID NO: 11629 - DNA, 25 bp, Artificial Sequence
  Synthetic Oligonucleotide
tgtctgcgaaatactaacttaactg

SEQ ID NO: 11630 - DNA, 25 bp, Artificial Sequence
  Synthetic Oligonucleotide
tgtactgtcgaagtcgctcaaaagg

SEQ ID NO: 11631 - DNA, 25 bp, Artificial Sequence
  Synthetic Oligonucleotide
tacgacatcgttgttcaataagagg

SEQ ID NO: 11632 - DNA, 25 bp, Artificial Sequence
  Synthetic Oligonucleotide
ttgtatcttcttggtcttaatgggg

SEQ ID NO: 11633 - DNA, 25 bp, Artificial Sequence
  Synthetic Oligonucleotide
ttggtttacttcacaactaaggaag

SEQ ID NO: 11634 - DNA, 25 bp, Artificial Sequence
  Synthetic Oligonucleotide
ctgttctacttcacatctgagaaag

SEQ ID NO: 11635 - DNA, 25 bp, Artificial Sequence
  Synthetic Oligonucleotide
ttgttctacattgcatctgagaaag

SEQ ID NO: 11636 - DNA, 25 bp, Artificial Sequence
  Synthetic Oligonucleotide
tatcttcctcctgtctggagaaacg

SEQ ID NO: 11637 - DNA, 25 bp, Artificial Sequence
  Synthetic Oligonucleotide
gaaattcttactatccttgtggaag

SEQ ID NO: 11638 - DNA, 25 bp, Artificial Sequence
  Synthetic Oligonucleotide
tatcttctattaccgcttgtagaag

SEQ ID NO: 11639 - DNA, 25 bp, Artificial Sequence
  Synthetic Oligonucleotide
catcttccacacgacggtctagaag

SEQ ID NO: 11640 - DNA, 25 bp, Artificial Sequence
  Synthetic Oligonucleotide
catcttccacacgacggtctagaag

SEQ ID NO: 11641 - DNA, 25 bp, Artificial Sequence
  Synthetic Oligonucleotide
catcttccacacgacggtctagaag

SEQ ID NO: 11642 - DNA, 25 bp, Artificial Sequence
  Synthetic Oligonucleotide
tcctgttccacaacttctagtcgag

SEQ ID NO: 11643 - DNA, 25 bp, Artificial Sequence
  Synthetic Oligonucleotide
gccacttcaacagctatctgtagag

SEQ ID NO: 11644 - DNA, 25 bp, Artificial Sequence
  Synthetic Oligonucleotide
gaaccgctctcttaacccttgtaag

SEQ ID NO: 11645 - DNA, 25 bp, Artificial Sequence
  Synthetic Oligonucleotide
gactctcgtccgtcgacccatgaag

SEQ ID NO: 11646 - DNA, 25 bp, Artificial Sequence
  Synthetic Oligonucleotide
tagcttctcgcgaaagcctagggag

SEQ ID NO: 11647 - DNA, 25 bp, Artificial Sequence
  Synthetic Oligonucleotide
tggtctctcccgaaaacgctgaggg

SEQ ID NO: 11648 - DNA, 25 bp, Artificial Sequence
  Synthetic Oligonucleotide
tgtcgccttcacgataacatgcagg

SEQ ID NO: 11649 - DNA, 25 bp, Artificial Sequence
  Synthetic Oligonucleotide
cttgctcttcacgacagacaaaagg

SEQ ID NO: 11650 - DNA, 25 bp, Artificial Sequence
  Synthetic Oligonucleotide
ccgtgccaacctgagtagcaaaagg

SEQ ID NO: 11651 - DNA, 25 bp, Artificial Sequence
  Synthetic Oligonucleotide
cgggccacaacatagacctaaaggt

SEQ ID NO: 11652 - DNA, 25 bp, Artificial Sequence
  Synthetic Oligonucleotide
ggtcgaacattagagaactttatat

SEQ ID NO: 11653 - DNA, 25 bp, Artificial Sequence
  Synthetic Oligonucleotide
tcgcgacagaaagtggacttagaat

SEQ ID NO: 11654 - DNA, 25 bp, Artificial Sequence
  Synthetic Oligonucleotide
gtcgaaaaaatctgcgctatcgaag

SEQ ID NO: 11655 - DNA, 25 bp, Artificial Sequence
  Synthetic Oligonucleotide
accagaaataagtacatcttcgatg

SEQ ID NO: 11656 - DNA, 25 bp, Artificial Sequence
  Synthetic Oligonucleotide
catcaataagccaagtagtcgatgt

SEQ ID NO: 11657 - DNA, 25 bp, Artificial Sequence
  Synthetic Oligonucleotide
ctctcgagaacatcccagtcgaaag

SEQ ID NO: 11658 - DNA, 25 bp, Artificial Sequence
  Synthetic Oligonucleotide
ctacagcagtattaaccgtcgaaag

SEQ ID NO: 11659 - DNA, 25 bp, Artificial Sequence
  Synthetic Oligonucleotide
cgtccctactactagacccgacggg

SEQ ID NO: 11660 - DNA, 25 bp, Artificial Sequence
  Synthetic Oligonucleotide
ctacgtccagacgatgcacggcggg

SEQ ID NO: 11661 - DNA, 25 bp, Artificial Sequence
  Synthetic Oligonucleotide
gacgtctaagtcgatgcccaagtag

SEQ ID NO: 11662 - DNA, 25 bp, Artificial Sequence
  Synthetic Oligonucleotide
gtacgcatttgatccgcggagatag

SEQ ID NO: 11663 - DNA, 25 bp, Artificial Sequence
  Synthetic Oligonucleotide
gaagactttcgagtcgggtagcacg

SEQ ID NO: 11664 - DNA, 25 bp, Artificial Sequence
  Synthetic Oligonucleotide
aaggactgtgtcagcgttggtccag

SEQ ID NO: 11665 - DNA, 25 bp, Artificial Sequence
  Synthetic Oligonucleotide
ataccaagtcgcagcggtgttcctg

SEQ ID NO: 11666 - DNA, 25 bp, Artificial Sequence
  Synthetic Oligonucleotide
gccaccggtcgcagcagtgcttgtg

SEQ ID NO: 11667 - DNA, 25 bp, Artificial Sequence
  Synthetic Oligonucleotide
cgtccaacgaggacgttgcgatttt

SEQ ID NO: 11668 - DNA, 25 bp, Artificial Sequence
  Synthetic Oligonucleotide
attaaaatgaccttgtcagagttat

SEQ ID NO: 11669 - DNA, 25 bp, Artificial Sequence
  Synthetic Oligonucleotide
tctatccctggcatgacagagtgct

SEQ ID NO: 11670 - DNA, 25 bp, Artificial Sequence
  Synthetic Oligonucleotide
ctactcttccttatgacagcggtct

SEQ ID NO: 11671 - DNA, 25 bp, Artificial Sequence
  Synthetic Oligonucleotide
tgttttcacgttatgtacaggtctg

SEQ ID NO: 11672 - DNA, 25 bp, Artificial Sequence
  Synthetic Oligonucleotide
gttctaatgacgaataaacttcttg

SEQ ID NO: 11673 - DNA, 25 bp, Artificial Sequence
  Synthetic Oligonucleotide
ttttattgtaggtacaacgattatg

SEQ ID NO: 11674 - DNA, 25 bp, Artificial Sequence
  Synthetic Oligonucleotide
attcaattatggtacgacaaaactg

SEQ ID NO: 11675 - DNA, 25 bp, Artificial Sequence
  Synthetic Oligonucleotide
tatcaaaaaggatctacagtgcctg

SEQ ID NO: 11676 - DNA, 25 bp, Artificial Sequence
  Synthetic Oligonucleotide
tcacagtgacaaattcagtctcctg

SEQ ID NO: 11677 - DNA, 25 bp, Artificial Sequence
  Synthetic Oligonucleotide
actacaggggagtttgaggtacctg

SEQ ID NO: 11678 - DNA, 25 bp, Artificial Sequence
  Synthetic Oligonucleotide
cccctatgggagcaacaggacctag

SEQ ID NO: 11679 - DNA, 25 bp, Artificial Sequence
  Synthetic Oligonucleotide
cccctacgggagcaacaggacctag

SEQ ID NO: 11680 - DNA, 25 bp, Artificial Sequence
  Synthetic Oligonucleotide
cccctacgggagcaacaggacctag

SEQ ID NO: 11681 - DNA, 25 bp, Artificial Sequence
  Synthetic Oligonucleotide
cccttacgggagcaacaggacctag

SEQ ID NO: 11682 - DNA, 25 bp, Artificial Sequence
  Synthetic Oligonucleotide
gtcttagacccgaaccaagacctag

SEQ ID NO: 11683 - DNA, 25 bp, Artificial Sequence
  Synthetic Oligonucleotide
atagacgcgctaaccactggagtag

SEQ ID NO: 11684 - DNA, 25 bp, Artificial Sequence
  Synthetic Oligonucleotide
catgaggacgaaggactaggtgtag

SEQ ID NO: 11685 - DNA, 25 bp, Artificial Sequence
  Synthetic Oligonucleotide
tcccctagagggtgacctaggcgag

SEQ ID NO: 11686 - DNA, 25 bp, Artificial Sequence
  Synthetic Oligonucleotide
tcacctcgccgatgggcctgaacgg

SEQ ID NO: 11687 - DNA, 25 bp, Artificial Sequence
  Synthetic Oligonucleotide
tcaacttccacctgagcacctatgg

SEQ ID NO: 11688 - DNA, 25 bp, Artificial Sequence
  Synthetic Oligonucleotide
tcaacattcttctgagcacctaagg

SEQ ID NO: 11689 - DNA, 25 bp, Artificial Sequence
  Synthetic Oligonucleotide
gactctttttactagaacctgaacg

SEQ ID NO: 11690 - DNA, 25 bp, Artificial Sequence
  Synthetic Oligonucleotide
cctcggtatttatagcacacctaat

SEQ ID NO: 11691 - DNA, 25 bp, Artificial Sequence
  Synthetic Oligonucleotide
gcctagcatttccagacaacattct

SEQ ID NO: 11692 - DNA, 25 bp, Artificial Sequence
  Synthetic Oligonucleotide
agctcgttatgccgacgaaacttgt

SEQ ID NO: 11693 - DNA, 25 bp, Artificial Sequence
  Synthetic Oligonucleotide
gcgaagtttgtcctctaggtcgttg

SEQ ID NO: 11694 - DNA, 25 bp, Artificial Sequence
  Synthetic Oligonucleotide
agacattatttctactagcgttgtg

SEQ ID NO: 11695 - DNA, 25 bp, Artificial Sequence
  Synthetic Oligonucleotide
agaatcgttgtatatctacctttag

SEQ ID NO: 11696 - DNA, 25 bp, Artificial Sequence
  Synthetic Oligonucleotide
ggacagttgtataaaccttctttag

SEQ ID NO: 11697 - DNA, 25 bp, Artificial Sequence
  Synthetic Oligonucleotide
ggactatagacataacttgaccaag

SEQ ID NO: 11698 - DNA, 25 bp, Artificial Sequence
  Synthetic Oligonucleotide
cataagtcaccgaacttcgccaagt

SEQ ID NO: 11699 - DNA, 25 bp, Artificial Sequence
  Synthetic Oligonucleotide
caagacacgtcccgcttcgaccttg

SEQ ID NO: 11700 - DNA, 25 bp, Artificial Sequence
  Synthetic Oligonucleotide
aacgacactcctccaaaccgtgtag

SEQ ID NO: 11701 - DNA, 25 bp, Artificial Sequence
  Synthetic Oligonucleotide
ccacgtcctccgaaacgactgttag

SEQ ID NO: 11702 - DNA, 25 bp, Artificial Sequence
  Synthetic Oligonucleotide
agtaccacgtcgtatagctacttag

SEQ ID NO: 11703 - DNA, 25 bp, Artificial Sequence
  Synthetic Oligonucleotide
agacacaccgtctctaccgtacttg

SEQ ID NO: 11704 - DNA, 25 bp, Artificial Sequence
  Synthetic Oligonucleotide
tcgtaaccacggtcacggttactag

SEQ ID NO: 11705 - DNA, 25 bp, Artificial Sequence
  Synthetic Oligonucleotide
attaagacactgtacgctgttacag

SEQ ID NO: 11706 - DNA, 25 bp, Artificial Sequence
  Synthetic Oligonucleotide
tccccagtaacttccgctgttacag

SEQ ID NO: 11707 - DNA, 25 bp, Artificial Sequence
  Synthetic Oligonucleotide
tccccagtaacttccgctgttatag

SEQ ID NO: 11708 - DNA, 25 bp, Artificial Sequence
  Synthetic Oligonucleotide
tttcagaactgcatctagacgtaag

SEQ ID NO: 11709 - DNA, 25 bp, Artificial Sequence
  Synthetic Oligonucleotide
ctgatcgctatatgcttctaataag

SEQ ID NO: 11710 - DNA, 25 bp, Artificial Sequence
  Synthetic Oligonucleotide
ctaatgacgtattaacttcttgttg

SEQ ID NO: 11711 - DNA, 25 bp, Artificial Sequence
  Synthetic Oligonucleotide
caagcaatagcgataattcgtctgt

SEQ ID NO: 11712 - DNA, 25 bp, Artificial Sequence
  Synthetic Oligonucleotide
acgtcgaatagcaacttaggtccgt

SEQ ID NO: 11713 - DNA, 25 bp, Artificial Sequence
  Synthetic Oligonucleotide
cactccagtaggctctgtacctcag

SEQ ID NO: 11714 - DNA, 25 bp, Artificial Sequence
  Synthetic Oligonucleotide
ccactatcagaatggtcactctcag

SEQ ID NO: 11715 - DNA, 25 bp, Artificial Sequence
  Synthetic Oligonucleotide
cccgcttgagcatcaactacttcgg

SEQ ID NO: 11716 - DNA, 25 bp, Artificial Sequence
  Synthetic Oligonucleotide
acagcagggtcatccactgctacgg

SEQ ID NO: 11717 - DNA, 25 bp, Artificial Sequence
  Synthetic Oligonucleotide
ctagccggtgtgtccctgactctgt

SEQ ID NO: 11718 - DNA, 25 bp, Artificial Sequence
  Synthetic Oligonucleotide
gagccgcgtgttacacaacgaccag

SEQ ID NO: 11719 - DNA, 25 bp, Artificial Sequence
  Synthetic Oligonucleotide
ggttagacgtttacactttcacagt

SEQ ID NO: 11720 - DNA, 25 bp, Artificial Sequence
  Synthetic Oligonucleotide
ggttagacctatacaatatagcagt

SEQ ID NO: 11721 - DNA, 25 bp, Artificial Sequence
  Synthetic Oligonucleotide
cgcggttaggccatcagccagcagt

SEQ ID NO: 11722 - DNA, 25 bp, Artificial Sequence
  Synthetic Oligonucleotide
cagcagttctacgatggcaagtcct

SEQ ID NO: 11723 - DNA, 25 bp, Artificial Sequence
  Synthetic Oligonucleotide
aggacttgccatcgtagaactgctg

SEQ ID NO: 11724 - DNA, 25 bp, Artificial Sequence
  Synthetic Oligonucleotide
gagggtgtctttaaatggcaaggat

SEQ ID NO: 11725 - DNA, 25 bp, Artificial Sequence
  Synthetic Oligonucleotide
gacgtctttatttgcggacgaattt

SEQ ID NO: 11726 - DNA, 25 bp, Artificial Sequence
  Synthetic Oligonucleotide
accttaatggcgccgacgaccgtgg

SEQ ID NO: 11727 - DNA, 25 bp, Artificial Sequence
  Synthetic Oligonucleotide
tctcaattttcgtcgggaccactgg

SEQ ID NO: 11728 - DNA, 25 bp, Artificial Sequence
  Synthetic Oligonucleotide
cgaccatggttcttggcgaaatagg

SEQ ID NO: 11729 - DNA, 25 bp, Artificial Sequence
  Synthetic Oligonucleotide
acagtaggtctgtgggtaacagtgg

SEQ ID NO: 11730 - DNA, 25 bp, Artificial Sequence
  Synthetic Oligonucleotide
cactagtgatcttgggcactattag

SEQ ID NO: 11731 - DNA, 25 bp, Artificial Sequence
  Synthetic Oligonucleotide
ccagtactacttcgagttattagag

SEQ ID NO: 11732 - DNA, 25 bp, Artificial Sequence
  Synthetic Oligonucleotide
cgctagtacacggtggacatgttgg

SEQ ID NO: 11733 - DNA, 25 bp, Artificial Sequence
  Synthetic Oligonucleotide
ccggacggcggtcgcaagttagact

SEQ ID NO: 11734 - DNA, 25 bp, Artificial Sequence
  Synthetic Oligonucleotide
ccaaggccaacgcatatctagtact

SEQ ID NO: 11735 - DNA, 25 bp, Artificial Sequence
  Synthetic Oligonucleotide
tcgaaaggtcgcagtcaacctagct

SEQ ID NO: 11736 - DNA, 25 bp, Artificial Sequence
  Synthetic Oligonucleotide
ttgaaacgaccgggtcaacgacagg

SEQ ID NO: 11737 - DNA, 25 bp, Artificial Sequence
  Synthetic Oligonucleotide
catgaagtcccagtcctacggagag

SEQ ID NO: 11738 - DNA, 25 bp, Artificial Sequence
  Synthetic Oligonucleotide
tcgaacttcgccggcaccggtagag

SEQ ID NO: 11739 - DNA, 25 bp, Artificial Sequence
  Synthetic Oligonucleotide
cacgagaatgggtgactcggtagag

SEQ ID NO: 11740 - DNA, 25 bp, Artificial Sequence
  Synthetic Oligonucleotide
cacgagaatggccgcttcggtagag

SEQ ID NO: 11741 - DNA, 25 bp, Artificial Sequence
  Synthetic Oligonucleotide
tcccacaagaagaccccgttgagag

SEQ ID NO: 11742 - DNA, 25 bp, Artificial Sequence
  Synthetic Oligonucleotide
accaaaggtagaaggaccgtttgag

SEQ ID NO: 11743 - DNA, 25 bp, Artificial Sequence
  Synthetic Oligonucleotide
tccgataggtagaggagtctttcag

SEQ ID NO: 11744 - DNA, 25 bp, Artificial Sequence
  Synthetic Oligonucleotide
tgggtgtgtaaggatgtctttcgtg

SEQ ID NO: 11745 - DNA, 25 bp, Artificial Sequence
  Synthetic Oligonucleotide
ggcgagtaacggctatcactactgg

SEQ ID NO: 11746 - DNA, 25 bp, Artificial Sequence
  Synthetic Oligonucleotide
ggccgcaaccggtacctctcgtgtg

SEQ ID NO: 11747 - DNA, 25 bp, Artificial Sequence
  Synthetic Oligonucleotide
acgaccctaatgtccgcactcggtg

SEQ ID NO: 11748 - DNA, 25 bp, Artificial Sequence
  Synthetic Oligonucleotide
taccttaaacggtacccaccttagt

SEQ ID NO: 11749 - DNA, 25 bp, Artificial Sequence
  Synthetic Oligonucleotide
tgtccttagccgtgtccccaggtgt

SEQ ID NO: 11750 - DNA, 25 bp, Artificial Sequence
  Synthetic Oligonucleotide
gtctcggtctccttgtccccagggt

SEQ ID NO: 11751 - DNA, 25 bp, Artificial Sequence
  Synthetic Oligonucleotide
ccttctgtcgtgctcctcgcagcag

SEQ ID NO: 11752 - DNA, 25 bp, Artificial Sequence
  Synthetic Oligonucleotide
gtcttccgttgttccctaaagacag

SEQ ID NO: 11753 - DNA, 25 bp, Artificial Sequence
  Synthetic Oligonucleotide
ccgcgccattaggacccaagatgag

SEQ ID NO: 11754 - DNA, 25 bp, Artificial Sequence
  Synthetic Oligonucleotide
caacattagtcgttcacaagccggt

SEQ ID NO: 11755 - DNA, 25 bp, Artificial Sequence
  Synthetic Oligonucleotide
atagttatagacttcacatgaacag

SEQ ID NO: 11756 - DNA, 25 bp, Artificial Sequence
  Synthetic Oligonucleotide
acagtagtataaaccgtccaaaaag

SEQ ID NO: 11757 - DNA, 25 bp, Artificial Sequence
  Synthetic Oligonucleotide
aagctactaacttcgcatagaaatg

SEQ ID NO: 11758 - DNA, 25 bp, Artificial Sequence
  Synthetic Oligonucleotide
tcaagactcctagtcctaaggaatt

SEQ ID NO: 11759 - DNA, 25 bp, Artificial Sequence
  Synthetic Oligonucleotide
tcagatcttcgttgttcaaaaagtt

SEQ ID NO: 11760 - DNA, 25 bp, Artificial Sequence
  Synthetic Oligonucleotide
gttcccgttagccactaaagagtgt

SEQ ID NO: 11761 - DNA, 25 bp, Artificial Sequence
  Synthetic Oligonucleotide
ttcccctacttgtctactgaaaggt

SEQ ID NO: 11762 - DNA, 25 bp, Artificial Sequence
  Synthetic Oligonucleotide
tttcccctacttgtctactgaaagg

SEQ ID NO: 11763 - DNA, 25 bp, Artificial Sequence
  Synthetic Oligonucleotide
gtatttcctttctctttacagaagg

SEQ ID NO: 11764 - DNA, 25 bp, Artificial Sequence
  Synthetic Oligonucleotide
ttctcgctgtattcgttcaaagagg

SEQ ID NO: 11765 - DNA, 25 bp, Artificial Sequence
  Synthetic Oligonucleotide
ttactacgtacgtacccataaagag

SEQ ID NO: 11766 - DNA, 25 bp, Artificial Sequence
  Synthetic Oligonucleotide
ttcgtcggcaccggtagagaacgag

SEQ ID NO: 11767 - DNA, 25 bp, Artificial Sequence
  Synthetic Oligonucleotide
tatacgcccgacgaagtcgacgaag

SEQ ID NO: 11768 - DNA, 25 bp, Artificial Sequence
  Synthetic Oligonucleotide
tagtcgttcacaagccggtagaagt

SEQ ID NO: 11769 - DNA, 25 bp, Artificial Sequence
  Synthetic Oligonucleotide
acacggttactagtccggctgaagt

SEQ ID NO: 11770 - DNA, 25 bp, Artificial Sequence
  Synthetic Oligonucleotide
aaagacgtttaagcagccttagagt

SEQ ID NO: 11771 - DNA, 25 bp, Artificial Sequence
  Synthetic Oligonucleotide
cagaagacgttatacttagcaaaag

SEQ ID NO: 11772 - DNA, 25 bp, Artificial Sequence
  Synthetic Oligonucleotide
ctgcaacgactagacctccttaagg

SEQ ID NO: 11773 - DNA, 25 bp, Artificial Sequence
  Synthetic Oligonucleotide
ttcagacacttaaatcgtcgtttgg

SEQ ID NO: 11774 - DNA, 25 bp, Artificial Sequence
  Synthetic Oligonucleotide
gtcgtcaccacctctttctcattgg

SEQ ID NO: 11775 - DNA, 25 bp, Artificial Sequence
  Synthetic Oligonucleotide
cgtcaccacctctttctcattggtg

SEQ ID NO: 11776 - DNA, 25 bp, Artificial Sequence
  Synthetic Oligonucleotide
cggacctaccaagtcctattagtgg

SEQ ID NO: 11777 - DNA, 25 bp, Artificial Sequence
  Synthetic Oligonucleotide
atgctctaccaacaacttcgatggt

SEQ ID NO: 11778 - DNA, 25 bp, Artificial Sequence
  Synthetic Oligonucleotide
atgacctcataacatacctaaaagt

SEQ ID NO: 11779 - DNA, 25 bp, Artificial Sequence
  Synthetic Oligonucleotide
cgtatgccaaagtccaagataaagt

SEQ ID NO: 11780 - DNA, 25 bp, Artificial Sequence
  Synthetic Oligonucleotide
gggcaccaagcaccgaacggtcaag

SEQ ID NO: 11781 - DNA, 25 bp, Artificial Sequence
  Synthetic Oligonucleotide
cgacacaaagataacagcttcaagt

SEQ ID NO: 11782 - DNA, 25 bp, Artificial Sequence
  Synthetic Oligonucleotide
tcaccctcaacgacaacttcagcgt

SEQ ID NO: 11783 - DNA, 25 bp, Artificial Sequence
  Synthetic Oligonucleotide
ctcacccacagtgacaacttcagtg

SEQ ID NO: 11784 - DNA, 25 bp, Artificial Sequence
  Synthetic Oligonucleotide
tccccgtactactaaactgcagtag

SEQ ID NO: 11785 - DNA, 25 bp, Artificial Sequence
  Synthetic Oligonucleotide
tccccgtactactaaactgcagtag

SEQ ID NO: 11786 - DNA, 25 bp, Artificial Sequence
  Synthetic Oligonucleotide
cggctacgccacgagttcgcggtag

SEQ ID NO: 11787 - DNA, 25 bp, Artificial Sequence
  Synthetic Oligonucleotide
tggctaagcccgaacggtcgcggag

SEQ ID NO: 11788 - DNA, 25 bp, Artificial Sequence
  Synthetic Oligonucleotide
ttgtggaaccccaagaacgagcggt

SEQ ID NO: 11789 - DNA, 25 bp, Artificial Sequence
  Synthetic Oligonucleotide
ttgatgacaccccatagtttaggtt

SEQ ID NO: 11790 - DNA, 25 bp, Artificial Sequence
  Synthetic Oligonucleotide
catgactcgtcctaatggtaccgtt

SEQ ID NO: 11791 - DNA, 25 bp, Artificial Sequence
  Synthetic Oligonucleotide
cacctgaggtgctacataagccgtg

SEQ ID NO: 11792 - DNA, 25 bp, Artificial Sequence
  Synthetic Oligonucleotide
tccccgggaccgtagataggttgtg

SEQ ID NO: 11793 - DNA, 25 bp, Artificial Sequence
  Synthetic Oligonucleotide
tcgtccccgaaccataagaatgttt

SEQ ID NO: 11794 - DNA, 25 bp, Artificial Sequence
  Synthetic Oligonucleotide
ctagacaacgaaccaaagacaattg

SEQ ID NO: 11795 - DNA, 25 bp, Artificial Sequence
  Synthetic Oligonucleotide
ctagtgttaaacgagaaacctttag

SEQ ID NO: 11796 - DNA, 25 bp, Artificial Sequence
  Synthetic Oligonucleotide
cctggtcaacccagaacacgtttat

SEQ ID NO: 11797 - DNA, 25 bp, Artificial Sequence
  Synthetic Oligonucleotide
ctttgtagacacctgataaagattt

SEQ ID NO: 11798 - DNA, 25 bp, Artificial Sequence
  Synthetic Oligonucleotide
ccttagtataaccttgtacatttgg

SEQ ID NO: 11799 - DNA, 25 bp, Artificial Sequence
  Synthetic Oligonucleotide
gctttttacgttattagtacttcgg

SEQ ID NO: 11800 - DNA, 25 bp, Artificial Sequence
  Synthetic Oligonucleotide
ctctttcatggtactgacttacgat

SEQ ID NO: 11801 - DNA, 25 bp, Artificial Sequence
  Synthetic Oligonucleotide
atttgttaccggtaactgtcttctt

SEQ ID NO: 11802 - DNA, 25 bp, Artificial Sequence
  Synthetic Oligonucleotide
tgtctatcccggtttcggtgtcctt

SEQ ID NO: 11803 - DNA, 25 bp, Artificial Sequence
  Synthetic Oligonucleotide
tctttcgacgggtctcggtctcctt

SEQ ID NO: 11804 - DNA, 25 bp, Artificial Sequence
  Synthetic Oligonucleotide
tcgttggacggtcgtctcatcttgg

SEQ ID NO: 11805 - DNA, 25 bp, Artificial Sequence
  Synthetic Oligonucleotide
tcgttatgcggacgaaacttgtgag

SEQ ID NO: 11806 - DNA, 25 bp, Artificial Sequence
  Synthetic Oligonucleotide
accgacttgcggtgaacagggagat

SEQ ID NO: 11807 - DNA, 25 bp, Artificial Sequence
  Synthetic Oligonucleotide
accatctagcggtcccagaccaggt

SEQ ID NO: 11808 - DNA, 25 bp, Artificial Sequence
  Synthetic Oligonucleotide
cttcttctgcgctcccaagcggtag

SEQ ID NO: 11809 - DNA, 25 bp, Artificial Sequence
  Synthetic Oligonucleotide
attttattggacgaagactccgggg

SEQ ID NO: 11810 - DNA, 25 bp, Artificial Sequence
  Synthetic Oligonucleotide
ttttattggacgaagactccggggt

SEQ ID NO: 11811 - DNA, 25 bp, Artificial Sequence
  Synthetic Oligonucleotide
tcctttttgacgtgcgccacgcagt

SEQ ID NO: 11812 - DNA, 25 bp, Artificial Sequence
  Synthetic Oligonucleotide
tcccggtttcggtgtccttagccgt

SEQ ID NO: 11813 - DNA, 25 bp, Artificial Sequence
  Synthetic Oligonucleotide
ctttgtttctgtcagtccgttgctg

SEQ ID NO: 11814 - DNA, 25 bp, Artificial Sequence
  Synthetic Oligonucleotide
caattgtctttggttcgttgtctag

SEQ ID NO: 11815 - DNA, 25 bp, Artificial Sequence
  Synthetic Oligonucleotide
cataccatgtctttgtttctgtcag

SEQ ID NO: 11816 - DNA, 25 bp, Artificial Sequence
  Synthetic Oligonucleotide
accgcctgttcttgtccttctcgag

SEQ ID NO: 11817 - DNA, 25 bp, Artificial Sequence
  Synthetic Oligonucleotide
ccaccaatgcgttgtaccagttcgg

SEQ ID NO: 11818 - DNA, 25 bp, Artificial Sequence
  Synthetic Oligonucleotide
ctagttgacgtggactcagttagtt

SEQ ID NO: 11819 - DNA, 25 bp, Artificial Sequence
  Synthetic Oligonucleotide
tctagaagtagttcatcagtcagtt

SEQ ID NO: 11820 - DNA, 25 bp, Artificial Sequence
  Synthetic Oligonucleotide
tcatctacgaagtttttggttgtct

SEQ ID NO: 11821 - DNA, 25 bp, Artificial Sequence
  Synthetic Oligonucleotide
ttaaacgacagaaacatcggtttag

SEQ ID NO: 11822 - DNA, 25 bp, Artificial Sequence
  Synthetic Oligonucleotide
gaacagaccataaacctagtttgtg

SEQ ID NO: 11823 - DNA, 25 bp, Artificial Sequence
  Synthetic Oligonucleotide
cagaggtaaaggaccagtatcaggt

SEQ ID NO: 11824 - DNA, 25 bp, Artificial Sequence
  Synthetic Oligonucleotide
caaaaggaggaaccagagggtacgt

SEQ ID NO: 11825 - DNA, 25 bp, Artificial Sequence
  Synthetic Oligonucleotide
acattaggcggttgcacgccggtag

SEQ ID NO: 11826 - DNA, 25 bp, Artificial Sequence
  Synthetic Oligonucleotide
aagatgaccggtcgaaactcagtag

SEQ ID NO: 11827 - DNA, 25 bp, Artificial Sequence
  Synthetic Oligonucleotide
aaatacacctggacacacctagtag

SEQ ID NO: 11828 - DNA, 25 bp, Artificial Sequence
  Synthetic Oligonucleotide
gtatctacccgtgtaacacccactg

SEQ ID NO: 11829 - DNA, 25 bp, Artificial Sequence
  Synthetic Oligonucleotide
gcttcttcttgtagctacctcactg

SEQ ID NO: 11830 - DNA, 25 bp, Artificial Sequence
  Synthetic Oligonucleotide
tgatttccttcgagataatctatgt

SEQ ID NO: 11831 - DNA, 25 bp, Artificial Sequence
  Synthetic Oligonucleotide
atgagtcttccacagaagaatttgt

SEQ ID NO: 11832 - DNA, 25 bp, Artificial Sequence
  Synthetic Oligonucleotide
gacgtcttctcaaaacccatgttgt

SEQ ID NO: 11833 - DNA, 25 bp, Artificial Sequence
  Synthetic Oligonucleotide
tacgtcctctgctacaccagtttgt

SEQ ID NO: 11834 - DNA, 25 bp, Artificial Sequence
  Synthetic Oligonucleotide
gtgtcacctggttgtctctgttgag

SEQ ID NO: 11835 - DNA, 25 bp, Artificial Sequence
  Synthetic Oligonucleotide
ggttcttctcgtctgctcttattag

SEQ ID NO: 11836 - DNA, 25 bp, Artificial Sequence
  Synthetic Oligonucleotide
gttctgctcgtcactctagttgttg

SEQ ID NO: 11837 - DNA, 25 bp, Artificial Sequence
  Synthetic Oligonucleotide
tcttttagtgccatagttcgtgtag

SEQ ID NO: 11838 - DNA, 25 bp, Artificial Sequence
  Synthetic Oligonucleotide
tctccgcatgtccctatcgtgtcgg

SEQ ID NO: 11839 - DNA, 25 bp, Artificial Sequence
  Synthetic Oligonucleotide
cacctgaggtgctgtatgagtcgtg

SEQ ID NO: 11840 - DNA, 25 bp, Artificial Sequence
  Synthetic Oligonucleotide
cacctgaggtgctgtatgagtcgtg

SEQ ID NO: 11841 - DNA, 25 bp, Artificial Sequence
  Synthetic Oligonucleotide
cacctgaggtgttgtatgagtcgtg

SEQ ID NO: 11842 - DNA, 25 bp, Artificial Sequence
  Synthetic Oligonucleotide
cttcggtgttggtgctaagtactgt

SEQ ID NO: 11843 - DNA, 25 bp, Artificial Sequence
  Synthetic Oligonucleotide
ctgcggtgtttaccgcgattatatt

SEQ ID NO: 11844 - DNA, 25 bp, Artificial Sequence
  Synthetic Oligonucleotide
gccggagggtttcacgaccctaatg

SEQ ID NO: 11845 - DNA, 25 bp, Artificial Sequence
  Synthetic Oligonucleotide
gtcggagggctcatcgaccctaatg

SEQ ID NO: 11846 - DNA, 25 bp, Artificial Sequence
  Synthetic Oligonucleotide
cgttaaccgcctacacgccgaatag

SEQ ID NO: 11847 - DNA, 25 bp, Artificial Sequence
  Synthetic Oligonucleotide
cgtgtaaggcctaggtaacagatgt

SEQ ID NO: 11848 - DNA, 25 bp, Artificial Sequence
  Synthetic Oligonucleotide
aggacttgccatcgtagaactgctg

SEQ ID NO: 11849 - DNA, 25 bp, Artificial Sequence
  Synthetic Oligonucleotide
cagcagttctacgatggcaagtcct

SEQ ID NO: 11850 - DNA, 25 bp, Artificial Sequence
  Synthetic Oligonucleotide
gagggtgtcttttaatggcaaggat

SEQ ID NO: 11851 - DNA, 25 bp, Artificial Sequence
  Synthetic Oligonucleotide
gacgtctttattagcggacgaattt

SEQ ID NO: 11852 - DNA, 25 bp, Artificial Sequence
  Synthetic Oligonucleotide
accttaatggcggcgacgaccgtgg

SEQ ID NO: 11853 - DNA, 25 bp, Artificial Sequence
  Synthetic Oligonucleotide
tctcaattttcgacgggaccactgg

SEQ ID NO: 11854 - DNA, 25 bp, Artificial Sequence
  Synthetic Oligonucleotide
cgaccatggttcatggcgaaatagg

SEQ ID NO: 11855 - DNA, 25 bp, Artificial Sequence
  Synthetic Oligonucleotide
acagtaggtctgagggtaacagtgg

SEQ ID NO: 11856 - DNA, 25 bp, Artificial Sequence
  Synthetic Oligonucleotide
cactagtgatctagggcactattag

SEQ ID NO: 11857 - DNA, 25 bp, Artificial Sequence
  Synthetic Oligonucleotide
ccagtactacttggagttattagag

SEQ ID NO: 11858 - DNA, 25 bp, Artificial Sequence
  Synthetic Oligonucleotide
cgctagtacacgctggacatgttgg

SEQ ID NO: 11859 - DNA, 25 bp, Artificial Sequence
  Synthetic Oligonucleotide
ccggacggcggtggcaagttagact

SEQ ID NO: 11860 - DNA, 25 bp, Artificial Sequence
  Synthetic Oligonucleotide
ccaaggccaacggatatctagtact

SEQ ID NO: 11861 - DNA, 25 bp, Artificial Sequence
  Synthetic Oligonucleotide
tcgaaaggtcgctgtcaacctagct

SEQ ID NO: 11862 - DNA, 25 bp, Artificial Sequence
  Synthetic Oligonucleotide
ttgaaacgaccgcgtcaacgacagg

SEQ ID NO: 11863 - DNA, 25 bp, Artificial Sequence
  Synthetic Oligonucleotide
catgaagtcccactcctacggagag

SEQ ID NO: 11864 - DNA, 25 bp, Artificial Sequence
  Synthetic Oligonucleotide
tcgaacttcgcccgcaccggtagag

SEQ ID NO: 11865 - DNA, 25 bp, Artificial Sequence
  Synthetic Oligonucleotide
cacgagaatgggagactcggtagag

SEQ ID NO: 11866 - DNA, 25 bp, Artificial Sequence
  Synthetic Oligonucleotide
cacgagaatggcggcttcggtagag

SEQ ID NO: 11867 - DNA, 25 bp, Artificial Sequence
  Synthetic Oligonucleotide
tcccacaagaagtccccgttgagag

SEQ ID NO: 11868 - DNA, 25 bp, Artificial Sequence
  Synthetic Oligonucleotide
accaaaggtagatggaccgtttgag

SEQ ID NO: 11869 - DNA, 25 bp, Artificial Sequence
  Synthetic Oligonucleotide
tccgataggtagtggagtctttcag

SEQ ID NO: 11870 - DNA, 25 bp, Artificial Sequence
  Synthetic Oligonucleotide
tgggtgtgtaagcatgtctttcgtg

SEQ ID NO: 11871 - DNA, 25 bp, Artificial Sequence
  Synthetic Oligonucleotide
ggcgagtaacgggtatcactactgg

SEQ ID NO: 11872 - DNA, 25 bp, Artificial Sequence
  Synthetic Oligonucleotide
ggccgcaaccggaacctctcgtgtg

SEQ ID NO: 11873 - DNA, 25 bp, Artificial Sequence
  Synthetic Oligonucleotide
acgaccctaatgaccgcactcggtg

SEQ ID NO: 11874 - DNA, 25 bp, Artificial Sequence
  Synthetic Oligonucleotide
taccttaaacggaacccaccttagt

SEQ ID NO: 11875 - DNA, 25 bp, Artificial Sequence
  Synthetic Oligonucleotide
tgtccttagccgagtccccaggtgt

SEQ ID NO: 11876 - DNA, 25 bp, Artificial Sequence
  Synthetic Oligonucleotide
gtctcggtctccatgtccccagggt

SEQ ID NO: 11877 - DNA, 25 bp, Artificial Sequence
  Synthetic Oligonucleotide
ccttctgtcgtggtcctcgcagcag

SEQ ID NO: 11878 - DNA, 25 bp, Artificial Sequence
  Synthetic Oligonucleotide
gtcttccgttgtaccctaaagacag

SEQ ID NO: 11879 - DNA, 25 bp, Artificial Sequence
  Synthetic Oligonucleotide
ccgcgccattagcacccaagatgag

SEQ ID NO: 11880 - DNA, 25 bp, Artificial Sequence
  Synthetic Oligonucleotide
caacattagtcgatcacaagccggt

SEQ ID NO: 11881 - DNA, 25 bp, Artificial Sequence
  Synthetic Oligonucleotide
atagttatagacatcacatgaacag

SEQ ID NO: 11882 - DNA, 25 bp, Artificial Sequence
  Synthetic Oligonucleotide
acagtagtataatccgtccaaaaag

SEQ ID NO: 11883 - DNA, 25 bp, Artificial Sequence
  Synthetic Oligonucleotide
aagctactaactacgcatagaaatg

SEQ ID NO: 11884 - DNA, 25 bp, Artificial Sequence
  Synthetic Oligonucleotide
tcaagactcctactcctaaggaatt

SEQ ID NO: 11885 - DNA, 25 bp, Artificial Sequence
  Synthetic Oligonucleotide
tcagatcttcgtagttcaaaaagtt

SEQ ID NO: 11886 - DNA, 25 bp, Artificial Sequence
  Synthetic Oligonucleotide
gttcccgttagcgactaaagagtgt

SEQ ID NO: 11887 - DNA, 25 bp, Artificial Sequence
  Synthetic Oligonucleotide
ttcccctacttgactactgaaaggt

SEQ ID NO: 11888 - DNA, 25 bp, Artificial Sequence
  Synthetic Oligonucleotide
tttcccctacttctctactgaaagg

SEQ ID NO: 11889 - DNA, 25 bp, Artificial Sequence
  Synthetic Oligonucleotide
gtatttcctttcactttacagaagg

SEQ ID NO: 11890 - DNA, 25 bp, Artificial Sequence
  Synthetic Oligonucleotide
ttctcgctgtatacgttcaaagagg

SEQ ID NO: 11891 - DNA, 25 bp, Artificial Sequence
  Synthetic Oligonucleotide
ttactacgtacgaacccataaagag

SEQ ID NO: 11892 - DNA, 25 bp, Artificial Sequence
  Synthetic Oligonucleotide
ttcgtcggcacccgtagagaacgag

SEQ ID NO: 11893 - DNA, 25 bp, Artificial Sequence
  Synthetic Oligonucleotide
tatacgcccgaccaagtcgacgaag

SEQ ID NO: 11894 - DNA, 25 bp, Artificial Sequence
  Synthetic Oligonucleotide
tagtcgttcacatgccggtagaagt

SEQ ID NO: 11895 - DNA, 25 bp, Artificial Sequence
  Synthetic Oligonucleotide
acacggttactactccggctgaagt

SEQ ID NO: 11896 - DNA, 25 bp, Artificial Sequence
  Synthetic Oligonucleotide
aaagacgtttaaccagccttagagt

SEQ ID NO: 11897 - DNA, 25 bp, Artificial Sequence
  Synthetic Oligonucleotide
cagaagacgttaaacttagcaaaag

SEQ ID NO: 11898 - DNA, 25 bp, Artificial Sequence
  Synthetic Oligonucleotide
ctgcaacgactacacctccttaagg

SEQ ID NO: 11899 - DNA, 25 bp, Artificial Sequence
  Synthetic Oligonucleotide
ttcagacacttatatcgtcgtttgg

SEQ ID NO: 11900 - DNA, 25 bp, Artificial Sequence
  Synthetic Oligonucleotide
gtcgtcaccaccactttctcattgg

SEQ ID NO: 11901 - DNA, 25 bp, Artificial Sequence
  Synthetic Oligonucleotide
cgtcaccacctcattctcattggtg

SEQ ID NO: 11902 - DNA, 25 bp, Artificial Sequence
  Synthetic Oligonucleotide
cggacctaccaactcctattagtgg

SEQ ID NO: 11903 - DNA, 25 bp, Artificial Sequence
  Synthetic Oligonucleotide
atgctctaccaagaacttcgatggt

SEQ ID NO: 11904 - DNA, 25 bp, Artificial Sequence
  Synthetic Oligonucleotide
atgacctcataagatacctaaaagt

SEQ ID NO: 11905 - DNA, 25 bp, Artificial Sequence
  Synthetic Oligonucleotide
cgtatgccaaagaccaagataaagt

SEQ ID NO: 11906 - DNA, 25 bp, Artificial Sequence
  Synthetic Oligonucleotide
gggcaccaagcagcgaacggtcaag

SEQ ID NO: 11907 - DNA, 25 bp, Artificial Sequence
  Synthetic Oligonucleotide
cgacacaaagattacagcttcaagt

SEQ ID NO: 11908 - DNA, 25 bp, Artificial Sequence
  Synthetic Oligonucleotide
tcaccctcaacgtcaacttcagcgt

SEQ ID NO: 11909 - DNA, 25 bp, Artificial Sequence
  Synthetic Oligonucleotide
ctcacccacagtcacaacttcagtg

SEQ ID NO: 11910 - DNA, 25 bp, Artificial Sequence
  Synthetic Oligonucleotide
tccccgtactacaaaactgcagtag

SEQ ID NO: 11911 - DNA, 25 bp, Artificial Sequence
  Synthetic Oligonucleotide
tccccgtactacaaaactgcagtag

SEQ ID NO: 11912 - DNA, 25 bp, Artificial Sequence
  Synthetic Oligonucleotide
cggctacgccaccagttcgcggtag

SEQ ID NO: 11913 - DNA, 25 bp, Artificial Sequence
  Synthetic Oligonucleotide
tggctaagcccgtacggtcgcggag

SEQ ID NO: 11914 - DNA, 25 bp, Artificial Sequence
  Synthetic Oligonucleotide
ttgtggaacccctagaacgagcggt

SEQ ID NO: 11915 - DNA, 25 bp, Artificial Sequence
  Synthetic Oligonucleotide
ttgatgacacccgatagtttaggtt

SEQ ID NO: 11916 - DNA, 25 bp, Artificial Sequence
  Synthetic Oligonucleotide
catgactcgtccaaatggtaccgtt

SEQ ID NO: 11917 - DNA, 25 bp, Artificial Sequence
  Synthetic Oligonucleotide
cacctgaggtgcaacataagccgtg

SEQ ID NO: 11918 - DNA, 25 bp, Artificial Sequence
  Synthetic Oligonucleotide
tccccgggaccgaagataggttgtg

SEQ ID NO: 11919 - DNA, 25 bp, Artificial Sequence
  Synthetic Oligonucleotide
tcgtccccgaacgataagaatgttt

SEQ ID NO: 11920 - DNA, 25 bp, Artificial Sequence
  Synthetic Oligonucleotide
ctagacaacgaagcaaagacaattg

SEQ ID NO: 11921 - DNA, 25 bp, Artificial Sequence
  Synthetic Oligonucleotide
ctagtgttaaaccagaaacctttag

SEQ ID NO: 11922 - DNA, 25 bp, Artificial Sequence
  Synthetic Oligonucleotide
cctggtcaaccctgaacacgtttat

SEQ ID NO: 11923 - DNA, 25 bp, Artificial Sequence
  Synthetic Oligonucleotide
ctttgtagacacgtgataaagattt

SEQ ID NO: 11924 - DNA, 25 bp, Artificial Sequence
  Synthetic Oligonucleotide
ccttagtataacgttgtacatttgg

SEQ ID NO: 11925 - DNA, 25 bp, Artificial Sequence
  Synthetic Oligonucleotide
gctttttacgtttttagtacttcgg

SEQ ID NO: 11926 - DNA, 25 bp, Artificial Sequence
  Synthetic Oligonucleotide
ctctttcatggttctgacttacgat

SEQ ID NO: 11927 - DNA, 25 bp, Artificial Sequence
  Synthetic Oligonucleotide
atttgttaccggaaactgtcttctt

SEQ ID NO: 11928 - DNA, 25 bp, Artificial Sequence
  Synthetic Oligonucleotide
tgtctatcccggattcggtgtcctt

SEQ ID NO: 11929 - DNA, 25 bp, Artificial Sequence
  Synthetic Oligonucleotide
tctttcgacgggactcggtctcctt

SEQ ID NO: 11930 - DNA, 25 bp, Artificial Sequence
  Synthetic Oligonucleotide
tcgttggacggtggtctcatcttgg

SEQ ID NO: 11931 - DNA, 25 bp, Artificial Sequence
  Synthetic Oligonucleotide
tcgttatgcggaggaaacttgtgag

SEQ ID NO: 11932 - DNA, 25 bp, Artificial Sequence
  Synthetic Oligonucleotide
accgacttgcggagaacagggagat

SEQ ID NO: 11933 - DNA, 25 bp, Artificial Sequence
  Synthetic Oligonucleotide
accatctagcggacccagaccaggt

SEQ ID NO: 11934 - DNA, 25 bp, Artificial Sequence
  Synthetic Oligonucleotide
cttcttctgcgcacccaagcggtag

SEQ ID NO: 11935 - DNA, 25 bp, Artificial Sequence
  Synthetic Oligonucleotide
attttattggaccaagactccgggg

SEQ ID NO: 11936 - DNA, 25 bp, Artificial Sequence
  Synthetic Oligonucleotide
ttttattggacgtagactccggggt

SEQ ID NO: 11937 - DNA, 25 bp, Artificial Sequence
  Synthetic Oligonucleotide
tcctttttgacgagcgccacgcagt

SEQ ID NO: 11938 - DNA, 25 bp, Artificial Sequence
  Synthetic Oligonucleotide
tcccggtttcggagtccttagccgt

SEQ ID NO: 11939 - DNA, 25 bp, Artificial Sequence
  Synthetic Oligonucleotide
ctttgtttctgtgagtccgttgctg

SEQ ID NO: 11940 - DNA, 25 bp, Artificial Sequence
  Synthetic Oligonucleotide
caattgtctttgcttcgttgtctag

SEQ ID NO: 11941 - DNA, 25 bp, Artificial Sequence
  Synthetic Oligonucleotide
cataccatgtctatgtttctgtcag

SEQ ID NO: 11942 - DNA, 25 bp, Artificial Sequence
  Synthetic Oligonucleotide
accgcctgttctagtccttctcgag

SEQ ID NO: 11943 - DNA, 25 bp, Artificial Sequence
  Synthetic Oligonucleotide
ccaccaatgcgtagtaccagttcgg

SEQ ID NO: 11944 - DNA, 25 bp, Artificial Sequence
  Synthetic Oligonucleotide
ctagttgacgtgcactcagttagtt

SEQ ID NO: 11945 - DNA, 25 bp, Artificial Sequence
  Synthetic Oligonucleotide
tctagaagtagtacatcagtcagtt

SEQ ID NO: 11946 - DNA, 25 bp, Artificial Sequence
  Synthetic Oligonucleotide
tcatctacgaagattttggttgtct

SEQ ID NO: 11947 - DNA, 25 bp, Artificial Sequence
  Synthetic Oligonucleotide
ttaaacgacagatacatcggtttag

SEQ ID NO: 11948 - DNA, 25 bp, Artificial Sequence
  Synthetic Oligonucleotide
gaacagaccatatacctagtttgtg

SEQ ID NO: 11949 - DNA, 25 bp, Artificial Sequence
  Synthetic Oligonucleotide
cagaggtaaaggtccagtatcaggt

SEQ ID NO: 11950 - DNA, 25 bp, Artificial Sequence
  Synthetic Oligonucleotide
caaaaggaggaagcagagggtacgt

SEQ ID NO: 11951 - DNA, 25 bp, Artificial Sequence
  Synthetic Oligonucleotide
acattaggcggtagcacgccggtag

SEQ ID NO: 11952 - DNA, 25 bp, Artificial Sequence
  Synthetic Oligonucleotide
aagatgaccggtggaaactcagtag

SEQ ID NO: 11953 - DNA, 25 bp, Artificial Sequence
  Synthetic Oligonucleotide
aaatacacctggtcacacctagtag

SEQ ID NO: 11954 - DNA, 25 bp, Artificial Sequence
  Synthetic Oligonucleotide
gtatctacccgtctaacacccactg

SEQ ID NO: 11955 - DNA, 25 bp, Artificial Sequence
  Synthetic Oligonucleotide
gcttcttcttgttgctacctcactg

SEQ ID NO: 11956 - DNA, 25 bp, Artificial Sequence
  Synthetic Oligonucleotide
tgatttccttcgtgataatctatgt

SEQ ID NO: 11957 - DNA, 25 bp, Artificial Sequence
  Synthetic Oligonucleotide
atgagtcttccagagaagaatttgt

SEQ ID NO: 11958 - DNA, 25 bp, Artificial Sequence
  Synthetic Oligonucleotide
gacgtcttctcataacccatgttgt

SEQ ID NO: 11959 - DNA, 25 bp, Artificial Sequence
  Synthetic Oligonucleotide
tacgtcctctgcaacaccagtttgt

SEQ ID NO: 11960 - DNA, 25 bp, Artificial Sequence
  Synthetic Oligonucleotide
gtgtcacctggtagtctctgttgag

SEQ ID NO: 11961 - DNA, 25 bp, Artificial Sequence
  Synthetic Oligonucleotide
ggttcttctcgtgtgctcttattag

SEQ ID NO: 11962 - DNA, 25 bp, Artificial Sequence
  Synthetic Oligonucleotide
gttctgctcgtctctctagttgttg

SEQ ID NO: 11963 - DNA, 25 bp, Artificial Sequence
  Synthetic Oligonucleotide
tcttttagtgccttagttcgtgtag

SEQ ID NO: 11964 - DNA, 25 bp, Artificial Sequence
  Synthetic Oligonucleotide
tctccgcatgtcgctatcgtgtcgg

SEQ ID NO: 11965 - DNA, 25 bp, Artificial Sequence
  Synthetic Oligonucleotide
cacctgaggtgcagtatgagtcgtg

SEQ ID NO: 11966 - DNA, 25 bp, Artificial Sequence
  Synthetic Oligonucleotide
cacctgaggtgcagtatgagtcgtg

SEQ ID NO: 11967 - DNA, 25 bp, Artificial Sequence
  Synthetic Oligonucleotide
cacctgaggtgtagtatgagtcgtg

SEQ ID NO: 11968 - DNA, 25 bp, Artificial Sequence
  Synthetic Oligonucleotide
cttcggtgttggagctaagtactgt

SEQ ID NO: 11969 - DNA, 25 bp, Artificial Sequence
  Synthetic Oligonucleotide
ctgcggtgtttagcgcgattatatt

SEQ ID NO: 11970 - DNA, 25 bp, Artificial Sequence
  Synthetic Oligonucleotide
gccggagggtttgacgaccctaatg

SEQ ID NO: 11971 - DNA, 25 bp, Artificial Sequence
  Synthetic Oligonucleotide
gtcggagggctcttcgaccctaatg

SEQ ID NO: 11972 - DNA, 25 bp, Artificial Sequence
  Synthetic Oligonucleotide
cgttaaccgccttcacgccgaatag

SEQ ID NO: 11973 - DNA, 25 bp, Artificial Sequence
  Synthetic Oligonucleotide
cgtgtaaggccttggtaacagatgt

SEQ ID NO: 11974 - DNA, 25 bp, Artificial Sequence
  Synthetic Oligonucleotide
cagcagttctacgatggcaagtcct

SEQ ID NO: 11975 - DNA, 25 bp, Artificial Sequence
  Synthetic Oligonucleotide
aggacttgccatcgtagaactgctg

SEQ ID NO: 11976 - DNA, 25 bp, Artificial Sequence
  Synthetic Oligonucleotide
tgcttcttgctctacttcacagctg

SEQ ID NO: 11977 - DNA, 25 bp, Artificial Sequence
  Synthetic Oligonucleotide
gttttagttctttctcgagagttag

SEQ ID NO: 11978 - DNA, 25 bp, Artificial Sequence
  Synthetic Oligonucleotide
tgtttttacgtgtacgacactcgag

SEQ ID NO: 11979 - DNA, 25 bp, Artificial Sequence
  Synthetic Oligonucleotide
tcctttaaaaggttctctactcgag

SEQ ID NO: 11980 - DNA, 25 bp, Artificial Sequence
  Synthetic Oligonucleotide
ccactatcagaaaggccactctcag

SEQ ID NO: 11981 - DNA, 25 bp, Artificial Sequence
  Synthetic Oligonucleotide
acggtcactcgaagggcaactcgag

SEQ ID NO: 11982 - DNA, 25 bp, Artificial Sequence
  Synthetic Oligonucleotide
acggtcactcgaagggcaagtcgag

SEQ ID NO: 11983 - DNA, 25 bp, Artificial Sequence
  Synthetic Oligonucleotide
accgttactggggctataagtcgag

SEQ ID NO: 11984 - DNA, 25 bp, Artificial Sequence
  Synthetic Oligonucleotide
gacttactgcagctcgaagttcgag

SEQ ID NO: 11985 - DNA, 25 bp, Artificial Sequence
  Synthetic Oligonucleotide
gcgccctgtgagtcgattctcgtag

SEQ ID NO: 11986 - DNA, 25 bp, Artificial Sequence
  Synthetic Oligonucleotide
aactcacctgacatcagtattctgg

SEQ ID NO: 11987 - DNA, 25 bp, Artificial Sequence
  Synthetic Oligonucleotide
caacgaccctaaacttgagacctgg

SEQ ID NO: 11988 - DNA, 25 bp, Artificial Sequence
  Synthetic Oligonucleotide
ccgtcccgtccgatctagagcatgg

SEQ ID NO: 11989 - DNA, 25 bp, Artificial Sequence
  Synthetic Oligonucleotide
ctccatcacgcaactgacctaaggt

SEQ ID NO: 11990 - DNA, 25 bp, Artificial Sequence
  Synthetic Oligonucleotide
tttcctcaccgaagttacaacagtg

SEQ ID NO: 11991 - DNA, 25 bp, Artificial Sequence
  Synthetic Oligonucleotide
cttccacaccacggtctagaagagg

SEQ ID NO: 11992 - DNA, 25 bp, Artificial Sequence
  Synthetic Oligonucleotide
tccggtacatccggtactccaggtg

SEQ ID NO: 11993 - DNA, 25 bp, Artificial Sequence
  Synthetic Oligonucleotide
cctactggaaccggtccccacgatt

SEQ ID NO: 11994 - DNA, 25 bp, Artificial Sequence
  Synthetic Oligonucleotide
cgtaggagtggcagcgccaccactg

SEQ ID NO: 11995 - DNA, 25 bp, Artificial Sequence
  Synthetic Oligonucleotide
tacgcgaagatgaggcccgcactag

SEQ ID NO: 11996 - DNA, 25 bp, Artificial Sequence
  Synthetic Oligonucleotide
agtgcggtgttgaacggccttccag

SEQ ID NO: 11997 - DNA, 25 bp, Artificial Sequence
  Synthetic Oligonucleotide
gtgcggtgtcgaaaggtctccccgg

SEQ ID NO: 11998 - DNA, 25 bp, Artificial Sequence
  Synthetic Oligonucleotide
gtcgtgtcccacgaggagtccccgg

SEQ ID NO: 11999 - DNA, 25 bp, Artificial Sequence
  Synthetic Oligonucleotide
ctgtagcctcatgagcgggtccctg

SEQ ID NO: 12000 - DNA, 25 bp, Artificial Sequence
  Synthetic Oligonucleotide
ctgtgtctactataaagcccctcag

SEQ ID NO: 12001 - DNA, 25 bp, Artificial Sequence
  Synthetic Oligonucleotide
tttttgtcactgtaatggcccctct

SEQ ID NO: 12002 - DNA, 25 bp, Artificial Sequence
  Synthetic Oligonucleotide
gggtttgcctatatttgtccctcct

SEQ ID NO: 12003 - DNA, 25 bp, Artificial Sequence
  Synthetic Oligonucleotide
ctctttctatctctttaccacgcct

SEQ ID NO: 12004 - DNA, 25 bp, Artificial Sequence
  Synthetic Oligonucleotide
cttctactatgtcttctaagctctt

SEQ ID NO: 12005 - DNA, 25 bp, Artificial Sequence
  Synthetic Oligonucleotide
cgctcgctatgtactatttgattct

SEQ ID NO: 12006 - DNA, 25 bp, Artificial Sequence
  Synthetic Oligonucleotide
acgaccgtttctcttgtgtggtcct

SEQ ID NO: 12007 - DNA, 25 bp, Artificial Sequence
  Synthetic Oligonucleotide
gaagtcccgtacttactttaagcct

SEQ ID NO: 12008 - DNA, 25 bp, Artificial Sequence
  Synthetic Oligonucleotide
gtagaaatcgtcggacttgcagcct

SEQ ID NO: 12009 - DNA, 25 bp, Artificial Sequence
  Synthetic Oligonucleotide
gagaaactttaggtgtagacaacct

SEQ ID NO: 12010 - DNA, 25 bp, Artificial Sequence
  Synthetic Oligonucleotide
aacaacgttcgtacaagcgaacagt

SEQ ID NO: 12011 - DNA, 25 bp, Artificial Sequence
  Synthetic Oligonucleotide
tatcggcggacgactataaggccgt

SEQ ID NO: 12012 - DNA, 25 bp, Artificial Sequence
  Synthetic Oligonucleotide
gtatacggtggacacgaaagtcggg

SEQ ID NO: 12013 - DNA, 25 bp, Artificial Sequence
  Synthetic Oligonucleotide
acgacggtggaactacagatactgg

SEQ ID NO: 12014 - DNA, 25 bp, Artificial Sequence
  Synthetic Oligonucleotide
cggacgttgccgacgtagatatgtg

SEQ ID NO: 12015 - DNA, 25 bp, Artificial Sequence
  Synthetic Oligonucleotide
tgcattctccaaccgtagtactagg

SEQ ID NO: 12016 - DNA, 25 bp, Artificial Sequence
  Synthetic Oligonucleotide
ctgtcgctgctcgagttgtagcagg

SEQ ID NO: 12017 - DNA, 25 bp, Artificial Sequence
  Synthetic Oligonucleotide
taccgtgactcgcgtagtagtttgg

SEQ ID NO: 12018 - DNA, 25 bp, Artificial Sequence
  Synthetic Oligonucleotide
ctcacgtcaccgcgctagagccgag

SEQ ID NO: 12019 - DNA, 25 bp, Artificial Sequence
  Synthetic Oligonucleotide
ccttcacgtccaaccacatgaccgg

SEQ ID NO: 12020 - DNA, 25 bp, Artificial Sequence
  Synthetic Oligonucleotide
acgttagcttccgacgcatgtcagg

SEQ ID NO: 12021 - DNA, 25 bp, Artificial Sequence
  Synthetic Oligonucleotide
agtctaacttgcgaccgccgtccgg

SEQ ID NO: 12022 - DNA, 25 bp, Artificial Sequence
  Synthetic Oligonucleotide
taaagtctcgcagctcgtccttcgg

SEQ ID NO: 12023 - DNA, 25 bp, Artificial Sequence
  Synthetic Oligonucleotide
agaagtactccattagtcattctag

SEQ ID NO: 12024 - DNA, 25 bp, Artificial Sequence
  Synthetic Oligonucleotide
acgtacaccaacgtcaacgctacgt

SEQ ID NO: 12025 - DNA, 25 bp, Artificial Sequence
  Synthetic Oligonucleotide
gaagtaccacgatcctcggtcccgt

SEQ ID NO: 12026 - DNA, 25 bp, Artificial Sequence
  Synthetic Oligonucleotide
cgaaggtgtccctacctttcctagt

SEQ ID NO: 12027 - DNA, 25 bp, Artificial Sequence
  Synthetic Oligonucleotide
gtgggtgccttagctctttctcgat

SEQ ID NO: 12028 - DNA, 25 bp, Artificial Sequence
  Synthetic Oligonucleotide
cctggagtcccgtcgcctttgcgag

SEQ ID NO: 12029 - DNA, 25 bp, Artificial Sequence
  Synthetic Oligonucleotide
catgaagtcccagtcctatggagag

SEQ ID NO: 12030 - DNA, 25 bp, Artificial Sequence
  Synthetic Oligonucleotide
catgaactcccattcctatggagag

SEQ ID NO: 12031 - DNA, 25 bp, Artificial Sequence
  Synthetic Oligonucleotide
catgaactctcagtcctatggggag

SEQ ID NO: 12032 - DNA, 25 bp, Artificial Sequence
  Synthetic Oligonucleotide
tgagtgaaccattcccaacggggag

SEQ ID NO: 12033 - DNA, 25 bp, Artificial Sequence
  Synthetic Oligonucleotide
accatgtcacactgagtgtggtagt

SEQ ID NO: 12034 - DNA, 25 bp, Artificial Sequence
  Synthetic Oligonucleotide
ccgccgtacagtctaggtgttgcct

SEQ ID NO: 12035 - DNA, 25 bp, Artificial Sequence
  Synthetic Oligonucleotide
atgctcgaagacgataggactccct

SEQ ID NO: 12036 - DNA, 25 bp, Artificial Sequence
  Synthetic Oligonucleotide
tccagaagaccgaaagtgtacactt

SEQ ID NO: 12037 - DNA, 25 bp, Artificial Sequence
  Synthetic Oligonucleotide
ttcgtacctaacgaaatgcgactct

SEQ ID NO: 12038 - DNA, 25 bp, Artificial Sequence
  Synthetic Oligonucleotide
gacccttgtaccaccatggtggcct

SEQ ID NO: 12039 - DNA, 25 bp, Artificial Sequence
  Synthetic Oligonucleotide
tttgtacccccgtagtcgtcttcct

SEQ ID NO: 12040 - DNA, 25 bp, Artificial Sequence
  Synthetic Oligonucleotide
ttttgcctaccaccgtttactttgt

SEQ ID NO: 12041 - DNA, 25 bp, Artificial Sequence
  Synthetic Oligonucleotide
tttgacgctcgctatgtactatttg

SEQ ID NO: 12042 - DNA, 25 bp, Artificial Sequence
  Synthetic Oligonucleotide
ttttagctctactaaacgagtttgt

SEQ ID NO: 12043 - DNA, 25 bp, Artificial Sequence
  Synthetic Oligonucleotide
cagaagtgcttctaaacgtatggtg

SEQ ID NO: 12044 - DNA, 25 bp, Artificial Sequence
  Synthetic Oligonucleotide
ttcaaaggcggctataatatcggat

SEQ ID NO: 12045 - DNA, 25 bp, Artificial Sequence
  Synthetic Oligonucleotide
tcccccggggatttgggtctcgagt

SEQ ID NO: 12046 - DNA, 25 bp, Artificial Sequence
  Synthetic Oligonucleotide
cgtccagggccttctgcggcacggt

SEQ ID NO: 12047 - DNA, 25 bp, Artificial Sequence
  Synthetic Oligonucleotide
accggtggtgcctctgcctcgtggt

SEQ ID NO: 12048 - DNA, 25 bp, Artificial Sequence
  Synthetic Oligonucleotide
agctcggctgcctagcccgactggt

SEQ ID NO: 12049 - DNA, 25 bp, Artificial Sequence
  Synthetic Oligonucleotide
agatggccggtttagctaagagttt

SEQ ID NO: 12050 - DNA, 25 bp, Artificial Sequence
  Synthetic Oligonucleotide
agctggtgaatttcgcttagttcat

SEQ ID NO: 12051 - DNA, 25 bp, Artificial Sequence
  Synthetic Oligonucleotide
tggtgggaagttcactcttcttcgg

SEQ ID NO: 12052 - DNA, 25 bp, Artificial Sequence
  Synthetic Oligonucleotide
gtgaaacagtgttctcttccgtcgg

SEQ ID NO: 12053 - DNA, 25 bp, Artificial Sequence
  Synthetic Oligonucleotide
ttcggggtctggtaccatccgtcgg

SEQ ID NO: 12054 - DNA, 25 bp, Artificial Sequence
  Synthetic Oligonucleotide
tcggtgtttgaaacccgtgagtcgg

SEQ ID NO: 12055 - DNA, 25 bp, Artificial Sequence
  Synthetic Oligonucleotide
gtcgtatgttaagaaccgggttcgg

SEQ ID NO: 12056 - DNA, 25 bp, Artificial Sequence
  Synthetic Oligonucleotide
tcgtatgttaagaaccgggttcggt

SEQ ID NO: 12057 - DNA, 25 bp, Artificial Sequence
  Synthetic Oligonucleotide
ttatccttagagaaggtgtctccgt

SEQ ID NO: 12058 - DNA, 25 bp, Artificial Sequence
  Synthetic Oligonucleotide
cgcttctgaagaggagacggtcttt

SEQ ID NO: 12059 - DNA, 25 bp, Artificial Sequence
  Synthetic Oligonucleotide
cactcttggacgacgtggcgctatg

SEQ ID NO: 12060 - DNA, 25 bp, Artificial Sequence
  Synthetic Oligonucleotide
gttcccttgtcaattgaacctatgt

SEQ ID NO: 12061 - DNA, 25 bp, Artificial Sequence
  Synthetic Oligonucleotide
ttcccttgtcggatgttttccgtgt

SEQ ID NO: 12062 - DNA, 25 bp, Artificial Sequence
  Synthetic Oligonucleotide
tcccttgacgcgtttctcttacttg

SEQ ID NO: 12063 - DNA, 25 bp, Artificial Sequence
  Synthetic Oligonucleotide
ctcgttggacggtcgtctcatcttg

SEQ ID NO: 12064 - DNA, 25 bp, Artificial Sequence
  Synthetic Oligonucleotide
ccgtcgaaacggacgtctgggtatg

SEQ ID NO: 12065 - DNA, 25 bp, Artificial Sequence
  Synthetic Oligonucleotide
aaagtgaacactttgggtgagaagt

SEQ ID NO: 12066 - DNA, 25 bp, Artificial Sequence
  Synthetic Oligonucleotide
actcgtcacctctttgtgttgaagt

SEQ ID NO: 12067 - DNA, 25 bp, Artificial Sequence
  Synthetic Oligonucleotide
ccccgggtcatatgtttttgaacgt

SEQ ID NO: 12068 - DNA, 25 bp, Artificial Sequence
  Synthetic Oligonucleotide
aagaggcgatttatctctcgtaggt

SEQ ID NO: 12069 - DNA, 25 bp, Artificial Sequence
  Synthetic Oligonucleotide
cacatgagtaaggttaatgtcccgg

SEQ ID NO: 12070 - DNA, 25 bp, Artificial Sequence
  Synthetic Oligonucleotide
cacctgagtaaggttaatgtcccgg

SEQ ID NO: 12071 - DNA, 25 bp, Artificial Sequence
  Synthetic Oligonucleotide
cggagtaaggtttgtacgatccggt

SEQ ID NO: 12072 - DNA, 25 bp, Artificial Sequence
  Synthetic Oligonucleotide
cggaacgtagaattgttgatcccgt

SEQ ID NO: 12073 - DNA, 25 bp, Artificial Sequence
  Synthetic Oligonucleotide
aaccgagagattatgcgtactactg

SEQ ID NO: 12074 - DNA, 25 bp, Artificial Sequence
  Synthetic Oligonucleotide
ctatgcgaagttagtagcttcgtag

SEQ ID NO: 12075 - DNA, 25 bp, Artificial Sequence
  Synthetic Oligonucleotide
gcgtaacgcaagtgcagcaacgagt

SEQ ID NO: 12076 - DNA, 25 bp, Artificial Sequence
  Synthetic Oligonucleotide
atgacagcagtgtgcacgacaagtt

SEQ ID NO: 12077 - DNA, 25 bp, Artificial Sequence
  Synthetic Oligonucleotide
tttcagaagtgcttctaaacgtatg

SEQ ID NO: 12078 - DNA, 25 bp, Artificial Sequence
  Synthetic Oligonucleotide
ttacgtgtatgttacctctaaaagg

SEQ ID NO: 12079 - DNA, 25 bp, Artificial Sequence
  Synthetic Oligonucleotide
acagtagtatgaaccgtccaaagag

SEQ ID NO: 12080 - DNA, 25 bp, Artificial Sequence
  Synthetic Oligonucleotide
actgttagaactcactcaacagtat

SEQ ID NO: 12081 - DNA, 25 bp, Artificial Sequence
  Synthetic Oligonucleotide
tgatctgttgacctataccaacatg

SEQ ID NO: 12082 - DNA, 25 bp, Artificial Sequence
  Synthetic Oligonucleotide
gtcgtgtcggacctaccgatgcatg

SEQ ID NO: 12083 - DNA, 25 bp, Artificial Sequence
  Synthetic Oligonucleotide
gcgtcgctccctcgacgagacgatg

SEQ ID NO: 12084 - DNA, 25 bp, Artificial Sequence
  Synthetic Oligonucleotide
agtcgagtccctactggaacgggtg

SEQ ID NO: 12085 - DNA, 25 bp, Artificial Sequence
  Synthetic Oligonucleotide
ctacgcgccgctagttggcgagttg

SEQ ID NO: 12086 - DNA, 25 bp, Artificial Sequence
  Synthetic Oligonucleotide
cccacgtccccgaggtggtgtttgt

SEQ ID NO: 12087 - DNA, 25 bp, Artificial Sequence
  Synthetic Oligonucleotide
cttgtaccaccatggtggcctgtat

SEQ ID NO: 12088 - DNA, 25 bp, Artificial Sequence
  Synthetic Oligonucleotide
tatttctccctacgttgtgctcctg

SEQ ID NO: 12089 - DNA, 25 bp, Artificial Sequence
  Synthetic Oligonucleotide
tttcgtgttctacgttggtgcctgt

SEQ ID NO: 12090 - DNA, 25 bp, Artificial Sequence
  Synthetic Oligonucleotide
tcttcggttctatcttggtggttag

SEQ ID NO: 12091 - DNA, 25 bp, Artificial Sequence
  Synthetic Oligonucleotide
cacgactcgtcacctctttgtgttg

SEQ ID NO: 12092 - DNA, 25 bp, Artificial Sequence
  Synthetic Oligonucleotide
ctgctcgtcactctagttgttgtct

SEQ ID NO: 12093 - DNA, 25 bp, Artificial Sequence
  Synthetic Oligonucleotide
acctcagacgttgagctgaggtact

SEQ ID NO: 12094 - DNA, 25 bp, Artificial Sequence
  Synthetic Oligonucleotide
gcctatagttacagcgtgaagtact

SEQ ID NO: 12095 - DNA, 25 bp, Artificial Sequence
  Synthetic Oligonucleotide
gtggcgcaagatcgtacctaagact

SEQ ID NO: 12096 - DNA, 25 bp, Artificial Sequence
  Synthetic Oligonucleotide
atagccgaacgaacgttccttagct

SEQ ID NO: 12097 - DNA, 25 bp, Artificial Sequence
  Synthetic Oligonucleotide
agaacgagtcgaggacgtcctatgg

SEQ ID NO: 12098 - DNA, 25 bp, Artificial Sequence
  Synthetic Oligonucleotide
caagatgagacgaccgtccaacgag

SEQ ID NO: 12099 - DNA, 25 bp, Artificial Sequence
  Synthetic Oligonucleotide
caataggcgacgtgtgtgaatcgtg

SEQ ID NO: 12100 - DNA, 25 bp, Artificial Sequence
  Synthetic Oligonucleotide
aggacttgccatcgtagaactgctg

SEQ ID NO: 12101 - DNA, 25 bp, Artificial Sequence
  Synthetic Oligonucleotide
cagcagttctacgatggcaagtcct

SEQ ID NO: 12102 - DNA, 25 bp, Artificial Sequence
  Synthetic Oligonucleotide
tgcttcttgctcaacttcacagctg

SEQ ID NO: 12103 - DNA, 25 bp, Artificial Sequence
  Synthetic Oligonucleotide
gttttagttcttactcgagagttag

SEQ ID NO: 12104 - DNA, 25 bp, Artificial Sequence
  Synthetic Oligonucleotide
tgtttttacgtgaacgacactcgag

SEQ ID NO: 12105 - DNA, 25 bp, Artificial Sequence
  Synthetic Oligonucleotide
tcctttaaaaggatctctactcgag

SEQ ID NO: 12106 - DNA, 25 bp, Artificial Sequence
  Synthetic Oligonucleotide
ccactatcagaatggccactctcag

SEQ ID NO: 12107 - DNA, 25 bp, Artificial Sequence
  Synthetic Oligonucleotide
acggtcactcgatgggcaactcgag

SEQ ID NO: 12108 - DNA, 25 bp, Artificial Sequence
  Synthetic Oligonucleotide
acggtcactcgatgggcaagtcgag

SEQ ID NO: 12109 - DNA, 25 bp, Artificial Sequence
  Synthetic Oligonucleotide
accgttactgggcctataagtcgag

SEQ ID NO: 12110 - DNA, 25 bp, Artificial Sequence
  Synthetic Oligonucleotide
gacttactgcaggtcgaagttcgag

SEQ ID NO: 12111 - DNA, 25 bp, Artificial Sequence
  Synthetic Oligonucleotide
gcgccctgtgagacgattctcgtag

SEQ ID NO: 12112 - DNA, 25 bp, Artificial Sequence
  Synthetic Oligonucleotide
aactcacctgacttcagtattctgg

SEQ ID NO: 12113 - DNA, 25 bp, Artificial Sequence
  Synthetic Oligonucleotide
caacgaccctaatcttgagacctgg

SEQ ID NO: 12114 - DNA, 25 bp, Artificial Sequence
  Synthetic Oligonucleotide
ccgtcccgtccgttctagagcatgg

SEQ ID NO: 12115 - DNA, 25 bp, Artificial Sequence
  Synthetic Oligonucleotide
ctccatcacgcatctgacctaaggt

SEQ ID NO: 12116 - DNA, 25 bp, Artificial Sequence
  Synthetic Oligonucleotide
tttcctcaccgatgttacaacagtg

SEQ ID NO: 12117 - DNA, 25 bp, Artificial Sequence
  Synthetic Oligonucleotide
cttccacaccaccgtctagaagagg

SEQ ID NO: 12118 - DNA, 25 bp, Artificial Sequence
  Synthetic Oligonucleotide
tccggtacatcccgtactccaggtg

SEQ ID NO: 12119 - DNA, 25 bp, Artificial Sequence
  Synthetic Oligonucleotide
cctactggaacccgtccccacgatt

SEQ ID NO: 12120 - DNA, 25 bp, Artificial Sequence
  Synthetic Oligonucleotide
cgtaggagtggctgcgccaccactg

SEQ ID NO: 12121 - DNA, 25 bp, Artificial Sequence
  Synthetic Oligonucleotide
tacgcgaagatgtggcccgcactag

SEQ ID NO: 12122 - DNA, 25 bp, Artificial Sequence
  Synthetic Oligonucleotide
agtgcggtgttgtacggccttccag

SEQ ID NO: 12123 - DNA, 25 bp, Artificial Sequence
  Synthetic Oligonucleotide
gtgcggtgtcgataggtctccccgg

SEQ ID NO: 12124 - DNA, 25 bp, Artificial Sequence
  Synthetic Oligonucleotide
gtcgtgtcccaccaggagtccccgg

SEQ ID NO: 12125 - DNA, 25 bp, Artificial Sequence
  Synthetic Oligonucleotide
ctgtagcctcatcagcgggtccctg

SEQ ID NO: 12126 - DNA, 25 bp, Artificial Sequence
  Synthetic Oligonucleotide
ctgtgtctactaaaaagcccctcag

SEQ ID NO: 12127 - DNA, 25 bp, Artificial Sequence
  Synthetic Oligonucleotide
tttttgtcactgaaatggcccctct

SEQ ID NO: 12128 - DNA, 25 bp, Artificial Sequence
  Synthetic Oligonucleotide
gggtttgcctatttttgtccctcct

SEQ ID NO: 12129 - DNA, 25 bp, Artificial Sequence
  Synthetic Oligonucleotide
ctctttctatctgtttaccacgcct

SEQ ID NO: 12130 - DNA, 25 bp, Artificial Sequence
  Synthetic Oligonucleotide
cttctactatgtgttctaagctctt

SEQ ID NO: 12131 - DNA, 25 bp, Artificial Sequence
  Synthetic Oligonucleotide
cgctcgctatgttctatttgattct

SEQ ID NO: 12132 - DNA, 25 bp, Artificial Sequence
  Synthetic Oligonucleotide
acgaccgtttctgttgtgtggtcct

SEQ ID NO: 12133 - DNA, 25 bp, Artificial Sequence
  Synthetic Oligonucleotide
gaagtcccgtacatactttaagcct

SEQ ID NO: 12134 - DNA, 25 bp, Artificial Sequence
  Synthetic Oligonucleotide
gtagaaatcgtccgacttgcagcct

SEQ ID NO: 12135 - DNA, 25 bp, Artificial Sequence
  Synthetic Oligonucleotide
gagaaactttagctgtagacaacct

SEQ ID NO: 12136 - DNA, 25 bp, Artificial Sequence
  Synthetic Oligonucleotide
aacaacgttcgttcaagcgaacagt

SEQ ID NO: 12137 - DNA, 25 bp, Artificial Sequence
  Synthetic Oligonucleotide
tatcggcggacgtctataaggccgt

SEQ ID NO: 12138 - DNA, 25 bp, Artificial Sequence
  Synthetic Oligonucleotide
gtatacggtggagacgaaagtcggg

SEQ ID NO: 12139 - DNA, 25 bp, Artificial Sequence
  Synthetic Oligonucleotide
acgacggtggaagtacagatactgg

SEQ ID NO: 12140 - DNA, 25 bp, Artificial Sequence
  Synthetic Oligonucleotide
cggacgttgccgtcgtagatatgtg

SEQ ID NO: 12141 - DNA, 25 bp, Artificial Sequence
  Synthetic Oligonucleotide
tgcattctccaagcgtagtactagg

SEQ ID NO: 12142 - DNA, 25 bp, Artificial Sequence
  Synthetic Oligonucleotide
ctgtcgctgctccagttgtagcagg

SEQ ID NO: 12143 - DNA, 25 bp, Artificial Sequence
  Synthetic Oligonucleotide
taccgtgactcgggtagtagtttgg

SEQ ID NO: 12144 - DNA, 25 bp, Artificial Sequence
  Synthetic Oligonucleotide
ctcacgtcaccgggctagagccgag

SEQ ID NO: 12145 - DNA, 25 bp, Artificial Sequence
  Synthetic Oligonucleotide
ccttcacgtccatccacatgaccgg

SEQ ID NO: 12146 - DNA, 25 bp, Artificial Sequence
  Synthetic Oligonucleotide
acgttagcttcccacgcatgtcagg

SEQ ID NO: 12147 - DNA, 25 bp, Artificial Sequence
  Synthetic Oligonucleotide
agtctaacttgccaccgccgtccgg

SEQ ID NO: 12148 - DNA, 25 bp, Artificial Sequence
  Synthetic Oligonucleotide
taaagtctcgcacctcgtccttcgg

SEQ ID NO: 12149 - DNA, 25 bp, Artificial Sequence
  Synthetic Oligonucleotide
agaagtactccaatagtcattctag

SEQ ID NO: 12150 - DNA, 25 bp, Artificial Sequence
  Synthetic Oligonucleotide
acgtacaccaacctcaacgctacgt

SEQ ID NO: 12151 - DNA, 25 bp, Artificial Sequence
  Synthetic Oligonucleotide
gaagtaccacgaacctcggtcccgt

SEQ ID NO: 12152 - DNA, 25 bp, Artificial Sequence
  Synthetic Oligonucleotide
cgaaggtgtcccaacctttcctagt

SEQ ID NO: 12153 - DNA, 25 bp, Artificial Sequence
  Synthetic Oligonucleotide
gtgggtgccttacctctttctcgat

SEQ ID NO: 12154 - DNA, 25 bp, Artificial Sequence
  Synthetic Oligonucleotide
cctggagtcccgacgcctttgcgag

SEQ ID NO: 12155 - DNA, 25 bp, Artificial Sequence
  Synthetic Oligonucleotide
catgaagtcccactcctatggagag

SEQ ID NO: 12156 - DNA, 25 bp, Artificial Sequence
  Synthetic Oligonucleotide
catgaactcccaatcctatggagag

SEQ ID NO: 12157 - DNA, 25 bp, Artificial Sequence
  Synthetic Oligonucleotide
catgaactctcactcctatggggag

SEQ ID NO: 12158 - DNA, 25 bp, Artificial Sequence
  Synthetic Oligonucleotide
tgagtgaaccatacccaacggggag

SEQ ID NO: 12159 - DNA, 25 bp, Artificial Sequence
  Synthetic Oligonucleotide
accatgtcacacagagtgtggtagt

SEQ ID NO: 12160 - DNA, 25 bp, Artificial Sequence
  Synthetic Oligonucleotide
ccgccgtacagtgtaggtgttgcct

SEQ ID NO: 12161 - DNA, 25 bp, Artificial Sequence
  Synthetic Oligonucleotide
atgctcgaagaccataggactccct

SEQ ID NO: 12162 - DNA, 25 bp, Artificial Sequence
  Synthetic Oligonucleotide
tccagaagaccgtaagtgtacactt

SEQ ID NO: 12163 - DNA, 25 bp, Artificial Sequence
  Synthetic Oligonucleotide
ttcgtacctaaccaaatgcgactct

SEQ ID NO: 12164 - DNA, 25 bp, Artificial Sequence
  Synthetic Oligonucleotide
gacccttgtacctccatggtggcct

SEQ ID NO: 12165 - DNA, 25 bp, Artificial Sequence
  Synthetic Oligonucleotide
tttgtacccccgaagtcgtcttcct

SEQ ID NO: 12166 - DNA, 25 bp, Artificial Sequence
  Synthetic Oligonucleotide
ttttgcctaccagcgtttactttgt

SEQ ID NO: 12167 - DNA, 25 bp, Artificial Sequence
  Synthetic Oligonucleotide
tttgacgctcgcaatgtactatttg

SEQ ID NO: 12168 - DNA, 25 bp, Artificial Sequence
  Synthetic Oligonucleotide
ttttagctctacaaaacgagtttgt

SEQ ID NO: 12169 - DNA, 25 bp, Artificial Sequence
  Synthetic Oligonucleotide
cagaagtgcttcaaaacgtatggtg

SEQ ID NO: 12170 - DNA, 25 bp, Artificial Sequence
  Synthetic Oligonucleotide
ttcaaaggcggcaataatatcggat

SEQ ID NO: 12171 - DNA, 25 bp, Artificial Sequence
  Synthetic Oligonucleotide
tcccccggggatatgggtctcgagt

SEQ ID NO: 12172 - DNA, 25 bp, Artificial Sequence
  Synthetic Oligonucleotide
cgtccagggcctactgcggcacggt

SEQ ID NO: 12173 - DNA, 25 bp, Artificial Sequence
  Synthetic Oligonucleotide
accggtggtgccactgcctcgtggt

SEQ ID NO: 12174 - DNA, 25 bp, Artificial Sequence
  Synthetic Oligonucleotide
agctcggctgccaagcccgactggt

SEQ ID NO: 12175 - DNA, 25 bp, Artificial Sequence
  Synthetic Oligonucleotide
agatggccggttaagctaagagttt

SEQ ID NO: 12176 - DNA, 25 bp, Artificial Sequence
  Synthetic Oligonucleotide
agctggtgaattacgcttagttcat

SEQ ID NO: 12177 - DNA, 25 bp, Artificial Sequence
  Synthetic Oligonucleotide
tggtgggaagttgactcttcttcgg

SEQ ID NO: 12178 - DNA, 25 bp, Artificial Sequence
  Synthetic Oligonucleotide
gtgaaacagtgtactcttccgtcgg

SEQ ID NO: 12179 - DNA, 25 bp, Artificial Sequence
  Synthetic Oligonucleotide
ttcggggtctggaaccatccgtcgg

SEQ ID NO: 12180 - DNA, 25 bp, Artificial Sequence
  Synthetic Oligonucleotide
tcggtgtttgaatcccgtgagtcgg

SEQ ID NO: 12181 - DNA, 25 bp, Artificial Sequence
  Synthetic Oligonucleotide
gtcgtatgttaacaaccgggttcgg

SEQ ID NO: 12182 - DNA, 25 bp, Artificial Sequence
  Synthetic Oligonucleotide
tcgtatgttaagtaccgggttcggt

SEQ ID NO: 12183 - DNA, 25 bp, Artificial Sequence
  Synthetic Oligonucleotide
ttatccttagagtaggtgtctccgt

SEQ ID NO: 12184 - DNA, 25 bp, Artificial Sequence
  Synthetic Oligonucleotide
cgcttctgaagacgagacggtcttt

SEQ ID NO: 12185 - DNA, 25 bp, Artificial Sequence
  Synthetic Oligonucleotide
cactcttggacgtcgtggcgctatg

SEQ ID NO: 12186 - DNA, 25 bp, Artificial Sequence
  Synthetic Oligonucleotide
gttcccttgtcatttgaacctatgt

SEQ ID NO: 12187 - DNA, 25 bp, Artificial Sequence
  Synthetic Oligonucleotide
ttcccttgtcggttgttttccgtgt

SEQ ID NO: 12188 - DNA, 25 bp, Artificial Sequence
  Synthetic Oligonucleotide
tcccttgacgcgattctcttacttg

SEQ ID NO: 12189 - DNA, 25 bp, Artificial Sequence
  Synthetic Oligonucleotide
ctcgttggacggacgtctcatcttg

SEQ ID NO: 12190 - DNA, 25 bp, Artificial Sequence
  Synthetic Oligonucleotide
ccgtcgaaacggtcgtctgggtatg

SEQ ID NO: 12191 - DNA, 25 bp, Artificial Sequence
  Synthetic Oligonucleotide
aaagtgaacactatgggtgagaagt

SEQ ID NO: 12192 - DNA, 25 bp, Artificial Sequence
  Synthetic Oligonucleotide
actcgtcacctcattgtgttgaagt

SEQ ID NO: 12193 - DNA, 25 bp, Artificial Sequence
  Synthetic Oligonucleotide
ccccgggtcataagtttttgaacgt

SEQ ID NO: 12194 - DNA, 25 bp, Artificial Sequence
  Synthetic Oligonucleotide
aagaggcgatttttctctcgtaggt

SEQ ID NO: 12195 - DNA, 25 bp, Artificial Sequence
  Synthetic Oligonucleotide
cacatgagtaagcttaatgtcccgg

SEQ ID NO: 12196 - DNA, 25 bp, Artificial Sequence
  Synthetic Oligonucleotide
cacctgagtaagcttaatgtcccgg

SEQ ID NO: 12197 - DNA, 25 bp, Artificial Sequence
  Synthetic Oligonucleotide
cggagtaaggttagtacgatccggt

SEQ ID NO: 12198 - DNA, 25 bp, Artificial Sequence
  Synthetic Oligonucleotide
cggaacgtagaaatgttgatcccgt

SEQ ID NO: 12199 - DNA, 25 bp, Artificial Sequence
  Synthetic Oligonucleotide
aaccgagagattttgcgtactactg

SEQ ID NO: 12200 - DNA, 25 bp, Artificial Sequence
  Synthetic Oligonucleotide
ctatgcgaagtttgtagcttcgtag

SEQ ID NO: 12201 - DNA, 25 bp, Artificial Sequence
  Synthetic Oligonucleotide
gcgtaacgcaagagcagcaacgagt

SEQ ID NO: 12202 - DNA, 25 bp, Artificial Sequence
  Synthetic Oligonucleotide
atgacagcagtgagcacgacaagtt

SEQ ID NO: 12203 - DNA, 25 bp, Artificial Sequence
  Synthetic Oligonucleotide
tttcagaagtgcatctaaacgtatg

SEQ ID NO: 12204 - DNA, 25 bp, Artificial Sequence
  Synthetic Oligonucleotide
ttacgtgtatgtaacctctaaaagg

SEQ ID NO: 12205 - DNA, 25 bp, Artificial Sequence
  Synthetic Oligonucleotide
acagtagtatgatccgtccaaagag

SEQ ID NO: 12206 - DNA, 25 bp, Artificial Sequence
  Synthetic Oligonucleotide
actgttagaactgactcaacagtat

SEQ ID NO: 12207 - DNA, 25 bp, Artificial Sequence
  Synthetic Oligonucleotide
tgatctgttgacgtataccaacatg

SEQ ID NO: 12208 - DNA, 25 bp, Artificial Sequence
  Synthetic Oligonucleotide
gtcgtgtcggacgtaccgatgcatg

SEQ ID NO: 12209 - DNA, 25 bp, Artificial Sequence
  Synthetic Oligonucleotide
gcgtcgctccctggacgagacgatg

SEQ ID NO: 12210 - DNA, 25 bp, Artificial Sequence
  Synthetic Oligonucleotide
agtcgagtcccttctggaacgggtg

SEQ ID NO: 12211 - DNA, 25 bp, Artificial Sequence
  Synthetic Oligonucleotide
ctacgcgccgcttgttggcgagttg

SEQ ID NO: 12212 - DNA, 25 bp, Artificial Sequence
  Synthetic Oligonucleotide
cccacgtccccgtggtggtgtttgt

SEQ ID NO: 12213 - DNA, 25 bp, Artificial Sequence
  Synthetic Oligonucleotide
cttgtaccaccaaggtggcctgtat

SEQ ID NO: 12214 - DNA, 25 bp, Artificial Sequence
  Synthetic Oligonucleotide
tatttctccctaggttgtgctcctg

SEQ ID NO: 12215 - DNA, 25 bp, Artificial Sequence
  Synthetic Oligonucleotide
tttcgtgttctaggttggtgcctgt

SEQ ID NO: 12216 - DNA, 25 bp, Artificial Sequence
  Synthetic Oligonucleotide
tcttcggttctaacttggtggttag

SEQ ID NO: 12217 - DNA, 25 bp, Artificial Sequence
  Synthetic Oligonucleotide
cacgactcgtcagctctttgtgttg

SEQ ID NO: 12218 - DNA, 25 bp, Artificial Sequence
  Synthetic Oligonucleotide
ctgctcgtcactgtagttgttgtct

SEQ ID NO: 12219 - DNA, 25 bp, Artificial Sequence
  Synthetic Oligonucleotide
acctcagacgttcagctgaggtact

SEQ ID NO: 12220 - DNA, 25 bp, Artificial Sequence
  Synthetic Oligonucleotide
gcctatagttactgcgtgaagtact

SEQ ID NO: 12221 - DNA, 25 bp, Artificial Sequence
  Synthetic Oligonucleotide
gtggcgcaagatggtacctaagact

SEQ ID NO: 12222 - DNA, 25 bp, Artificial Sequence
  Synthetic Oligonucleotide
atagccgaacgatcgttccttagct

SEQ ID NO: 12223 - DNA, 25 bp, Artificial Sequence
  Synthetic Oligonucleotide
agaacgagtcgacgacgtcctatgg

SEQ ID NO: 12224 - DNA, 25 bp, Artificial Sequence
  Synthetic Oligonucleotide
caagatgagacgtccgtccaacgag

SEQ ID NO: 12225 - DNA, 25 bp, Artificial Sequence
  Synthetic Oligonucleotide
caataggcgacgagtgtgaatcgtg

SEQ ID NO: 12226 - DNA, 25 bp, Artificial Sequence
  Synthetic Oligonucleotide
cagcagttctacgatggcaagtcct

SEQ ID NO: 12227 - DNA, 25 bp, Artificial Sequence
  Synthetic Oligonucleotide
aggacttgccatcgtagaactgctg

SEQ ID NO: 12228 - DNA, 25 bp, Artificial Sequence
  Synthetic Oligonucleotide
ctgacttcgtggctcgaaacgattg

SEQ ID NO: 12229 - DNA, 25 bp, Artificial Sequence
  Synthetic Oligonucleotide
atttctactgcgtcgagcacgattg

SEQ ID NO: 12230 - DNA, 25 bp, Artificial Sequence
  Synthetic Oligonucleotide
ctatatgtttggtcaacacgctggt

SEQ ID NO: 12231 - DNA, 25 bp, Artificial Sequence
  Synthetic Oligonucleotide
gacttcttgacgagaaccgacagag

SEQ ID NO: 12232 - DNA, 25 bp, Artificial Sequence
  Synthetic Oligonucleotide
ccttctgtcgggacccgcgtagtag

SEQ ID NO: 12233 - DNA, 25 bp, Artificial Sequence
  Synthetic Oligonucleotide
ctcctgtcgaacctaccgctgtatg

SEQ ID NO: 12234 - DNA, 25 bp, Artificial Sequence
  Synthetic Oligonucleotide
ctttagtcacaccaagtaccgttag

SEQ ID NO: 12235 - DNA, 25 bp, Artificial Sequence
  Synthetic Oligonucleotide
ccatgtcctccgtaacgactactag

SEQ ID NO: 12236 - DNA, 25 bp, Artificial Sequence
  Synthetic Oligonucleotide
aagcagttcctcgaagagctatagt

SEQ ID NO: 12237 - DNA, 25 bp, Artificial Sequence
  Synthetic Oligonucleotide
gtcgacatcggtgtagatgtcaagt

SEQ ID NO: 12238 - DNA, 25 bp, Artificial Sequence
  Synthetic Oligonucleotide
cgaagtcgtcgttgtgagttcagag

SEQ ID NO: 12239 - DNA, 25 bp, Artificial Sequence
  Synthetic Oligonucleotide
aaccagtagtattggcgtccagtag

SEQ ID NO: 12240 - DNA, 25 bp, Artificial Sequence
  Synthetic Oligonucleotide
cagtacccttattgcggcggcgtag

SEQ ID NO: 12241 - DNA, 25 bp, Artificial Sequence
  Synthetic Oligonucleotide
gtgcaacacccactgcggcagcggt

SEQ ID NO: 12242 - DNA, 25 bp, Artificial Sequence
  Synthetic Oligonucleotide
cgtgtaacacccactgcggcagcgg

SEQ ID NO: 12243 - DNA, 25 bp, Artificial Sequence
  Synthetic Oligonucleotide
ctgtatcagccgaggtctccgaggg

SEQ ID NO: 12244 - DNA, 25 bp, Artificial Sequence
  Synthetic Oligonucleotide
gtacctgccaccagtactccgggag

SEQ ID NO: 12245 - DNA, 25 bp, Artificial Sequence
  Synthetic Oligonucleotide
cgtacgttgaccgcgttcccgctgg

SEQ ID NO: 12246 - DNA, 25 bp, Artificial Sequence
  Synthetic Oligonucleotide
gctcgcgaaccgtggccgacctgag

SEQ ID NO: 12247 - DNA, 25 bp, Artificial Sequence
  Synthetic Oligonucleotide
accctccaggagtgaccggccggag

SEQ ID NO: 12248 - DNA, 25 bp, Artificial Sequence
  Synthetic Oligonucleotide
acccacctgtgctcggtcttcttgg

SEQ ID NO: 12249 - DNA, 25 bp, Artificial Sequence
  Synthetic Oligonucleotide
ccgaactggtacaacgcattggtgg

SEQ ID NO: 12250 - DNA, 25 bp, Artificial Sequence
  Synthetic Oligonucleotide
gcgctcgtcgtcagccacttgatgg

SEQ ID NO: 12251 - DNA, 25 bp, Artificial Sequence
  Synthetic Oligonucleotide
gagcttcagatcccgttgtatcgtg

SEQ ID NO: 12252 - DNA, 25 bp, Artificial Sequence
  Synthetic Oligonucleotide
gagtctagtgagaaaccgttgctgg

SEQ ID NO: 12253 - DNA, 25 bp, Artificial Sequence
  Synthetic Oligonucleotide
aagtctgtgaggtctggtcccgtag

SEQ ID NO: 12254 - DNA, 25 bp, Artificial Sequence
  Synthetic Oligonucleotide
gatttcttagagctttgctcccgtg

SEQ ID NO: 12255 - DNA, 25 bp, Artificial Sequence
  Synthetic Oligonucleotide
cgattccttggagctctgctccttt

SEQ ID NO: 12256 - DNA, 25 bp, Artificial Sequence
  Synthetic Oligonucleotide
gtcctccttagatgcctggaacttt

SEQ ID NO: 12257 - DNA, 25 bp, Artificial Sequence
  Synthetic Oligonucleotide
cccacttgttaggttgtgaaccact

SEQ ID NO: 12258 - DNA, 25 bp, Artificial Sequence
  Synthetic Oligonucleotide
cccacttgttaggttgtgaaccact

SEQ ID NO: 12259 - DNA, 25 bp, Artificial Sequence
  Synthetic Oligonucleotide
aggccgtttctagtttgcgacaact

SEQ ID NO: 12260 - DNA, 25 bp, Artificial Sequence
  Synthetic Oligonucleotide
gtgcggcttactactttgctaacat

SEQ ID NO: 12261 - DNA, 25 bp, Artificial Sequence
  Synthetic Oligonucleotide
ggggtacaagtaactgtttacaatt

SEQ ID NO: 12262 - DNA, 25 bp, Artificial Sequence
  Synthetic Oligonucleotide
aagaagacagttaccggtaacaaat

SEQ ID NO: 12263 - DNA, 25 bp, Artificial Sequence
  Synthetic Oligonucleotide
accgacagggtcttgagtgagacat

SEQ ID NO: 12264 - DNA, 25 bp, Artificial Sequence
  Synthetic Oligonucleotide
caacgaaggtcttagtcgatggcgg

SEQ ID NO: 12265 - DNA, 25 bp, Artificial Sequence
  Synthetic Oligonucleotide
gaaggtggtcacgtcggcgtaacgg

SEQ ID NO: 12266 - DNA, 25 bp, Artificial Sequence
  Synthetic Oligonucleotide
agaggtccgccgtacagtctaggtg

SEQ ID NO: 12267 - DNA, 25 bp, Artificial Sequence
  Synthetic Oligonucleotide
ccgcggtaccccaagtgtctaggtg

SEQ ID NO: 12268 - DNA, 25 bp, Artificial Sequence
  Synthetic Oligonucleotide
gtacggcgtctccaggttcaagtag

SEQ ID NO: 12269 - DNA, 25 bp, Artificial Sequence
  Synthetic Oligonucleotide
taccgttcttacaggtctataagtg

SEQ ID NO: 12270 - DNA, 25 bp, Artificial Sequence
  Synthetic Oligonucleotide
acacgcctatgggtcgagacacgtg

SEQ ID NO: 12271 - DNA, 25 bp, Artificial Sequence
  Synthetic Oligonucleotide
taccgtacctgacaccagtactcgg

SEQ ID NO: 12272 - DNA, 25 bp, Artificial Sequence
  Synthetic Oligonucleotide
tactccattagtcactctagtgcgg

SEQ ID NO: 12273 - DNA, 25 bp, Artificial Sequence
  Synthetic Oligonucleotide
gattctttatgaaccgtctcgtggg

SEQ ID NO: 12274 - DNA, 25 bp, Artificial Sequence
  Synthetic Oligonucleotide
gccgcaaccggtacctctcgtgtgg

SEQ ID NO: 12275 - DNA, 25 bp, Artificial Sequence
  Synthetic Oligonucleotide
acgatacacccgacacactgttagg

SEQ ID NO: 12276 - DNA, 25 bp, Artificial Sequence
  Synthetic Oligonucleotide
cgaacgatccgttcgcgagatggtg

SEQ ID NO: 12277 - DNA, 25 bp, Artificial Sequence
  Synthetic Oligonucleotide
cgaagcgccgttacggactagtctg

SEQ ID NO: 12278 - DNA, 25 bp, Artificial Sequence
  Synthetic Oligonucleotide
cgcaggctcgctaccggtgctactg

SEQ ID NO: 12279 - DNA, 25 bp, Artificial Sequence
  Synthetic Oligonucleotide
gtagcgggccatgccgactaccttg

SEQ ID NO: 12280 - DNA, 25 bp, Artificial Sequence
  Synthetic Oligonucleotide
gagagggtcgtcgccgcgcccttag

SEQ ID NO: 12281 - DNA, 25 bp, Artificial Sequence
  Synthetic Oligonucleotide
ataagggttactacccgtcaccttt

SEQ ID NO: 12282 - DNA, 25 bp, Artificial Sequence
  Synthetic Oligonucleotide
ataacactgctccccagcaacggtt

SEQ ID NO: 12283 - DNA, 25 bp, Artificial Sequence
  Synthetic Oligonucleotide
aaagatctgccgtccagtccaggtg

SEQ ID NO: 12284 - DNA, 25 bp, Artificial Sequence
  Synthetic Oligonucleotide
tgctactggtcgtccaacggagggt

SEQ ID NO: 12285 - DNA, 25 bp, Artificial Sequence
  Synthetic Oligonucleotide
ttgccggtgttccacgagcgggtgt

SEQ ID NO: 12286 - DNA, 25 bp, Artificial Sequence
  Synthetic Oligonucleotide
acgaccgtggtctgaacgggaggtt

SEQ ID NO: 12287 - DNA, 25 bp, Artificial Sequence
  Synthetic Oligonucleotide
ttatcgggtccatcggtgagtactt

SEQ ID NO: 12288 - DNA, 25 bp, Artificial Sequence
  Synthetic Oligonucleotide
acaccgtcgcgcatcgggagtatct

SEQ ID NO: 12289 - DNA, 25 bp, Artificial Sequence
  Synthetic Oligonucleotide
acaccgtcgcgcatcgggagtatct

SEQ ID NO: 12290 - DNA, 25 bp, Artificial Sequence
  Synthetic Oligonucleotide
tccaacggccgctaggtgagcacgt

SEQ ID NO: 12291 - DNA, 25 bp, Artificial Sequence
  Synthetic Oligonucleotide
cctacctcggcggctaggtgtgcct

SEQ ID NO: 12292 - DNA, 25 bp, Artificial Sequence
  Synthetic Oligonucleotide
aaccgttgctggggagcagtgttat

SEQ ID NO: 12293 - DNA, 25 bp, Artificial Sequence
  Synthetic Oligonucleotide
agttgcgtagcgacgcgaatgtgtg

SEQ ID NO: 12294 - DNA, 25 bp, Artificial Sequence
  Synthetic Oligonucleotide
tctgtgacatcgacagaagtctgtg

SEQ ID NO: 12295 - DNA, 25 bp, Artificial Sequence
  Synthetic Oligonucleotide
tgtgacatcgacagaagtctgtgtg

SEQ ID NO: 12296 - DNA, 25 bp, Artificial Sequence
  Synthetic Oligonucleotide
tagagtgccgcgaagaactactggg

SEQ ID NO: 12297 - DNA, 25 bp, Artificial Sequence
  Synthetic Oligonucleotide
caaccggtccgaccagaacttgagg

SEQ ID NO: 12298 - DNA, 25 bp, Artificial Sequence
  Synthetic Oligonucleotide
gacacggtccatgacagactaaagg

SEQ ID NO: 12299 - DNA, 25 bp, Artificial Sequence
  Synthetic Oligonucleotide
ccgttgttccctaaagacagtaagg

SEQ ID NO: 12300 - DNA, 25 bp, Artificial Sequence
  Synthetic Oligonucleotide
cgtctgttccagaagaccgaaagtg

SEQ ID NO: 12301 - DNA, 25 bp, Artificial Sequence
  Synthetic Oligonucleotide
atctcctcgcagatgaccagaaagt

SEQ ID NO: 12302 - DNA, 25 bp, Artificial Sequence
  Synthetic Oligonucleotide
tctgctgcacgaacggcagctcggt

SEQ ID NO: 12303 - DNA, 25 bp, Artificial Sequence
  Synthetic Oligonucleotide
atcagccactctagcgccggtcggt

SEQ ID NO: 12304 - DNA, 25 bp, Artificial Sequence
  Synthetic Oligonucleotide
actcgacgtgcagtggcatcagcgg

SEQ ID NO: 12305 - DNA, 25 bp, Artificial Sequence
  Synthetic Oligonucleotide
cactcctagacaaccatctagcggt

SEQ ID NO: 12306 - DNA, 25 bp, Artificial Sequence
  Synthetic Oligonucleotide
actcttacgaaacgagcgtatacgg

SEQ ID NO: 12307 - DNA, 25 bp, Artificial Sequence
  Synthetic Oligonucleotide
gtacttctacgcaccgtggctacgg

SEQ ID NO: 12308 - DNA, 25 bp, Artificial Sequence
  Synthetic Oligonucleotide
tagtatttcgaccacttggacgagg

SEQ ID NO: 12309 - DNA, 25 bp, Artificial Sequence
  Synthetic Oligonucleotide
ttattactcgactggtcggtgaagg

SEQ ID NO: 12310 - DNA, 25 bp, Artificial Sequence
  Synthetic Oligonucleotide
cttacatcacgactgcgtagaacgg

SEQ ID NO: 12311 - DNA, 25 bp, Artificial Sequence
  Synthetic Oligonucleotide
acctgacaccagtactcgggaaggt

SEQ ID NO: 12312 - DNA, 25 bp, Artificial Sequence
  Synthetic Oligonucleotide
ttgaactacacttactcacgcaatg

SEQ ID NO: 12313 - DNA, 25 bp, Artificial Sequence
  Synthetic Oligonucleotide
gtagcggactcagacaagcaagtag

SEQ ID NO: 12314 - DNA, 25 bp, Artificial Sequence
  Synthetic Oligonucleotide
tgtacgggagtgaccactgcatgtg

SEQ ID NO: 12315 - DNA, 25 bp, Artificial Sequence
  Synthetic Oligonucleotide
ttcgcgagatggtgactcgatttag

SEQ ID NO: 12316 - DNA, 25 bp, Artificial Sequence
  Synthetic Oligonucleotide
tgcaagtcgacgtgtcgggtcttag

SEQ ID NO: 12317 - DNA, 25 bp, Artificial Sequence
  Synthetic Oligonucleotide
aagaggaagctcaagtggccgttgt

SEQ ID NO: 12318 - DNA, 25 bp, Artificial Sequence
  Synthetic Oligonucleotide
cttaggcccgccaatgtgctcttat

SEQ ID NO: 12319 - DNA, 25 bp, Artificial Sequence
  Synthetic Oligonucleotide
gtcgcggccgatgagttggtctttt

SEQ ID NO: 12320 - DNA, 25 bp, Artificial Sequence
  Synthetic Oligonucleotide
gtcggggtcgtagtttccatcttct

SEQ ID NO: 12321 - DNA, 25 bp, Artificial Sequence
  Synthetic Oligonucleotide
ggtcgggcgaactcgtcccaatatt

SEQ ID NO: 12322 - DNA, 25 bp, Artificial Sequence
  Synthetic Oligonucleotide
aattgggacgccctacaccataagg

SEQ ID NO: 12323 - DNA, 25 bp, Artificial Sequence
  Synthetic Oligonucleotide
ggagagaacctaactcgaagtagtg

SEQ ID NO: 12324 - DNA, 25 bp, Artificial Sequence
  Synthetic Oligonucleotide
gagacagtacgaatatccatctagg

SEQ ID NO: 12325 - DNA, 25 bp, Artificial Sequence
  Synthetic Oligonucleotide
gacgacgcgaagtttgtcgtctagg

SEQ ID NO: 12326 - DNA, 25 bp, Artificial Sequence
  Synthetic Oligonucleotide
ccatgtcgtcgtcgaatttacttgg

SEQ ID NO: 12327 - DNA, 25 bp, Artificial Sequence
  Synthetic Oligonucleotide
gtaaggcgctagaaatttactaggg

SEQ ID NO: 12328 - DNA, 25 bp, Artificial Sequence
  Synthetic Oligonucleotide
tgttggaccaggagtcacatcgggt

SEQ ID NO: 12329 - DNA, 25 bp, Artificial Sequence
  Synthetic Oligonucleotide
cttgaggactggagtccactaggtg

SEQ ID NO: 12330 - DNA, 25 bp, Artificial Sequence
  Synthetic Oligonucleotide
tcggagccgggtaccctataggagt

SEQ ID NO: 12331 - DNA, 25 bp, Artificial Sequence
  Synthetic Oligonucleotide
catgggttagttgcgttataggtgt

SEQ ID NO: 12332 - DNA, 25 bp, Artificial Sequence
  Synthetic Oligonucleotide
atttgtgtttgtgacgtctaaggtg

SEQ ID NO: 12333 - DNA, 25 bp, Artificial Sequence
  Synthetic Oligonucleotide
ttatggtttgtggcagacgacgtat

SEQ ID NO: 12334 - DNA, 25 bp, Artificial Sequence
  Synthetic Oligonucleotide
ttctgtcgtgctcctcgcagcagtg

SEQ ID NO: 12335 - DNA, 25 bp, Artificial Sequence
  Synthetic Oligonucleotide
agaactggtcctatgacagcagtgt

SEQ ID NO: 12336 - DNA, 25 bp, Artificial Sequence
  Synthetic Oligonucleotide
tgaacatggccatgtgctacgccgg

SEQ ID NO: 12337 - DNA, 25 bp, Artificial Sequence
  Synthetic Oligonucleotide
acagcttgacccagtggtccggcgg

SEQ ID NO: 12338 - DNA, 25 bp, Artificial Sequence
  Synthetic Oligonucleotide
acggctagccgctgttgttgtggtt

SEQ ID NO: 12339 - DNA, 25 bp, Artificial Sequence
  Synthetic Oligonucleotide
gcggtaccccaagtgtctaggtgtg

SEQ ID NO: 12340 - DNA, 25 bp, Artificial Sequence
  Synthetic Oligonucleotide
caactcgccaactagcggcgcgtag

SEQ ID NO: 12341 - DNA, 25 bp, Artificial Sequence
  Synthetic Oligonucleotide
tttccacacagtaaggtcggtctag

SEQ ID NO: 12342 - DNA, 25 bp, Artificial Sequence
  Synthetic Oligonucleotide
gacgctctaacgaggtacgttctag

SEQ ID NO: 12343 - DNA, 25 bp, Artificial Sequence
  Synthetic Oligonucleotide
gtccgtcagtcgctgtactagcttt

SEQ ID NO: 12344 - DNA, 25 bp, Artificial Sequence
  Synthetic Oligonucleotide
tggtcctcaacggttacagttatgt

SEQ ID NO: 12345 - DNA, 25 bp, Artificial Sequence
  Synthetic Oligonucleotide
gatcctcgtacaccgagaccggctg

SEQ ID NO: 12346 - DNA, 25 bp, Artificial Sequence
  Synthetic Oligonucleotide
ttactatccttctcggctgtagctt

SEQ ID NO: 12347 - DNA, 25 bp, Artificial Sequence
  Synthetic Oligonucleotide
ttctagtgcaggtcggttcagttct

SEQ ID NO: 12348 - DNA, 25 bp, Artificial Sequence
  Synthetic Oligonucleotide
ctctagcgccggtcggtccaggtct

SEQ ID NO: 12349 - DNA, 25 bp, Artificial Sequence
  Synthetic Oligonucleotide
cgtgagttccggtcggtcccagtgt

SEQ ID NO: 12350 - DNA, 25 bp, Artificial Sequence
  Synthetic Oligonucleotide
ggaggtacatcgtccgtaaccacgg

SEQ ID NO: 12351 - DNA, 25 bp, Artificial Sequence
  Synthetic Oligonucleotide
gagaaacatacgcggtaacatcgtg

SEQ ID NO: 12352 - DNA, 25 bp, Artificial Sequence
  Synthetic Oligonucleotide
aggacttgccatcgtagaactgctg

SEQ ID NO: 12353 - DNA, 25 bp, Artificial Sequence
  Synthetic Oligonucleotide
cagcagttctacgatggcaagtcct

SEQ ID NO: 12354 - DNA, 25 bp, Artificial Sequence
  Synthetic Oligonucleotide
ctgacttcgtgggtcgaaacgattg

SEQ ID NO: 12355 - DNA, 25 bp, Artificial Sequence
  Synthetic Oligonucleotide
atttctactgcgacgagcacgattg

SEQ ID NO: 12356 - DNA, 25 bp, Artificial Sequence
  Synthetic Oligonucleotide
ctatatgtttggacaacacgctggt

SEQ ID NO: 12357 - DNA, 25 bp, Artificial Sequence
  Synthetic Oligonucleotide
gacttcttgacgtgaaccgacagag

SEQ ID NO: 12358 - DNA, 25 bp, Artificial Sequence
  Synthetic Oligonucleotide
ccttctgtcgggtcccgcgtagtag

SEQ ID NO: 12359 - DNA, 25 bp, Artificial Sequence
  Synthetic Oligonucleotide
ctcctgtcgaacgtaccgctgtatg

SEQ ID NO: 12360 - DNA, 25 bp, Artificial Sequence
  Synthetic Oligonucleotide
ctttagtcacacgaagtaccgttag

SEQ ID NO: 12361 - DNA, 25 bp, Artificial Sequence
  Synthetic Oligonucleotide
ccatgtcctccgaaacgactactag

SEQ ID NO: 12362 - DNA, 25 bp, Artificial Sequence
  Synthetic Oligonucleotide
aagcagttcctccaagagctatagt

SEQ ID NO: 12363 - DNA, 25 bp, Artificial Sequence
  Synthetic Oligonucleotide
gtcgacatcggtctagatgtcaagt

SEQ ID NO: 12364 - DNA, 25 bp, Artificial Sequence
  Synthetic Oligonucleotide
cgaagtcgtcgtagtgagttcagag

SEQ ID NO: 12365 - DNA, 25 bp, Artificial Sequence
  Synthetic Oligonucleotide
aaccagtagtataggcgtccagtag

SEQ ID NO: 12366 - DNA, 25 bp, Artificial Sequence
  Synthetic Oligonucleotide
cagtacccttatagcggcggcgtag

SEQ ID NO: 12367 - DNA, 25 bp, Artificial Sequence
  Synthetic Oligonucleotide
gtgcaacacccagtgcggcagcggt

SEQ ID NO: 12368 - DNA, 25 bp, Artificial Sequence
  Synthetic Oligonucleotide
cgtgtaacaccctctgcggcagcgg

SEQ ID NO: 12369 - DNA, 25 bp, Artificial Sequence
  Synthetic Oligonucleotide
ctgtatcagccgtggtctccgaggg

SEQ ID NO: 12370 - DNA, 25 bp, Artificial Sequence
  Synthetic Oligonucleotide
gtacctgccacctgtactccgggag

SEQ ID NO: 12371 - DNA, 25 bp, Artificial Sequence
  Synthetic Oligonucleotide
cgtacgttgaccccgttcccgctgg

SEQ ID NO: 12372 - DNA, 25 bp, Artificial Sequence
  Synthetic Oligonucleotide
gctcgcgaaccgaggccgacctgag

SEQ ID NO: 12373 - DNA, 25 bp, Artificial Sequence
  Synthetic Oligonucleotide
accctccaggagagaccggccggag

SEQ ID NO: 12374 - DNA, 25 bp, Artificial Sequence
  Synthetic Oligonucleotide
acccacctgtgcacggtcttcttgg

SEQ ID NO: 12375 - DNA, 25 bp, Artificial Sequence
  Synthetic Oligonucleotide
ccgaactggtactacgcattggtgg

SEQ ID NO: 12376 - DNA, 25 bp, Artificial Sequence
  Synthetic Oligonucleotide
gcgctcgtcgtctgccacttgatgg

SEQ ID NO: 12377 - DNA, 25 bp, Artificial Sequence
  Synthetic Oligonucleotide
gagcttcagatcgcgttgtatcgtg

SEQ ID NO: 12378 - DNA, 25 bp, Artificial Sequence
  Synthetic Oligonucleotide
gagtctagtgagtaaccgttgctgg

SEQ ID NO: 12379 - DNA, 25 bp, Artificial Sequence
  Synthetic Oligonucleotide
aagtctgtgaggactggtcccgtag

SEQ ID NO: 12380 - DNA, 25 bp, Artificial Sequence
  Synthetic Oligonucleotide
gatttcttagaggtttgctcccgtg

SEQ ID NO: 12381 - DNA, 25 bp, Artificial Sequence
  Synthetic Oligonucleotide
cgattccttggacctctgctccttt

SEQ ID NO: 12382 - DNA, 25 bp, Artificial Sequence
  Synthetic Oligonucleotide
gtcctccttagaagcctggaacttt

SEQ ID NO: 12383 - DNA, 25 bp, Artificial Sequence
  Synthetic Oligonucleotide
cccacttgttagcttgtgaaccact

SEQ ID NO: 12384 - DNA, 25 bp, Artificial Sequence
  Synthetic Oligonucleotide
cccacttgttagcttgtgaaccact

SEQ ID NO: 12385 - DNA, 25 bp, Artificial Sequence
  Synthetic Oligonucleotide
aggccgtttctactttgcgacaact

SEQ ID NO: 12386 - DNA, 25 bp, Artificial Sequence
  Synthetic Oligonucleotide
gtgcggcttacttctttgctaacat

SEQ ID NO: 12387 - DNA, 25 bp, Artificial Sequence
  Synthetic Oligonucleotide
ggggtacaagtatctgtttacaatt

SEQ ID NO: 12388 - DNA, 25 bp, Artificial Sequence
  Synthetic Oligonucleotide
aagaagacagtttccggtaacaaat

SEQ ID NO: 12389 - DNA, 25 bp, Artificial Sequence
  Synthetic Oligonucleotide
accgacagggtcatgagtgagacat

SEQ ID NO: 12390 - DNA, 25 bp, Artificial Sequence
  Synthetic Oligonucleotide
caacgaaggtctaagtcgatggcgg

SEQ ID NO: 12391 - DNA, 25 bp, Artificial Sequence
  Synthetic Oligonucleotide
gaaggtggtcacctcggcgtaacgg

SEQ ID NO: 12392 - DNA, 25 bp, Artificial Sequence
  Synthetic Oligonucleotide
agaggtccgccgaacagtctaggtg

SEQ ID NO: 12393 - DNA, 25 bp, Artificial Sequence
  Synthetic Oligonucleotide
ccgcggtacccctagtgtctaggtg

SEQ ID NO: 12394 - DNA, 25 bp, Artificial Sequence
  Synthetic Oligonucleotide
gtacggcgtctcgaggttcaagtag

SEQ ID NO: 12395 - DNA, 25 bp, Artificial Sequence
  Synthetic Oligonucleotide
taccgttcttactggtctataagtg

SEQ ID NO: 12396 - DNA, 25 bp, Artificial Sequence
  Synthetic Oligonucleotide
acacgcctatggctcgagacacgtg

SEQ ID NO: 12397 - DNA, 25 bp, Artificial Sequence
  Synthetic Oligonucleotide
taccgtacctgagaccagtactcgg

SEQ ID NO: 12398 - DNA, 25 bp, Artificial Sequence
  Synthetic Oligonucleotide
tactccattagtgactctagtgcgg

SEQ ID NO: 12399 - DNA, 25 bp, Artificial Sequence
  Synthetic Oligonucleotide
gattctttatgatccgtctcgtggg

SEQ ID NO: 12400 - DNA, 25 bp, Artificial Sequence
  Synthetic Oligonucleotide
gccgcaaccggttcctctcgtgtgg

SEQ ID NO: 12401 - DNA, 25 bp, Artificial Sequence
  Synthetic Oligonucleotide
acgatacacccgtcacactgttagg

SEQ ID NO: 12402 - DNA, 25 bp, Artificial Sequence
  Synthetic Oligonucleotide
cgaacgatccgtacgcgagatggtg

SEQ ID NO: 12403 - DNA, 25 bp, Artificial Sequence
  Synthetic Oligonucleotide
cgaagcgccgtttcggactagtctg

SEQ ID NO: 12404 - DNA, 25 bp, Artificial Sequence
  Synthetic Oligonucleotide
cgcaggctcgcttccggtgctactg

SEQ ID NO: 12405 - DNA, 25 bp, Artificial Sequence
  Synthetic Oligonucleotide
gtagcgggccatcccgactaccttg

SEQ ID NO: 12406 - DNA, 25 bp, Artificial Sequence
  Synthetic Oligonucleotide
gagagggtcgtccccgcgcccttag

SEQ ID NO: 12407 - DNA, 25 bp, Artificial Sequence
  Synthetic Oligonucleotide
ataagggttacttcccgtcaccttt

SEQ ID NO: 12408 - DNA, 25 bp, Artificial Sequence
  Synthetic Oligonucleotide
ataacactgctcgccagcaacggtt

SEQ ID NO: 12409 - DNA, 25 bp, Artificial Sequence
  Synthetic Oligonucleotide
aaagatctgccgaccagtccaggtg

SEQ ID NO: 12410 - DNA, 25 bp, Artificial Sequence
  Synthetic Oligonucleotide
tgctactggtcgaccaacggagggt

SEQ ID NO: 12411 - DNA, 25 bp, Artificial Sequence
  Synthetic Oligonucleotide
ttgccggtgttcgacgagcgggtgt

SEQ ID NO: 12412 - DNA, 25 bp, Artificial Sequence
  Synthetic Oligonucleotide
acgaccgtggtcagaacgggaggtt

SEQ ID NO: 12413 - DNA, 25 bp, Artificial Sequence
  Synthetic Oligonucleotide
ttatcgggtccaacggtgagtactt

SEQ ID NO: 12414 - DNA, 25 bp, Artificial Sequence
  Synthetic Oligonucleotide
acaccgtcgcgcttcgggagtatct

SEQ ID NO: 12415 - DNA, 25 bp, Artificial Sequence
  Synthetic Oligonucleotide
acaccgtcgcgcttcgggagtatct

SEQ ID NO: 12416 - DNA, 25 bp, Artificial Sequence
  Synthetic Oligonucleotide
tccaacggccgcaaggtgagcacgt

SEQ ID NO: 12417 - DNA, 25 bp, Artificial Sequence
  Synthetic Oligonucleotide
cctacctcggcgcctaggtgtgcct

SEQ ID NO: 12418 - DNA, 25 bp, Artificial Sequence
  Synthetic Oligonucleotide
aaccgttgctggcgagcagtgttat

SEQ ID NO: 12419 - DNA, 25 bp, Artificial Sequence
  Synthetic Oligonucleotide
agttgcgtagcgtcgcgaatgtgtg

SEQ ID NO: 12420 - DNA, 25 bp, Artificial Sequence
  Synthetic Oligonucleotide
tctgtgacatcgtcagaagtctgtg

SEQ ID NO: 12421 - DNA, 25 bp, Artificial Sequence
  Synthetic Oligonucleotide
tgtgacatcgactgaagtctgtgtg

SEQ ID NO: 12422 - DNA, 25 bp, Artificial Sequence
  Synthetic Oligonucleotide
tagagtgccgcgtagaactactggg

SEQ ID NO: 12423 - DNA, 25 bp, Artificial Sequence
  Synthetic Oligonucleotide
caaccggtccgagcagaacttgagg

SEQ ID NO: 12424 - DNA, 25 bp, Artificial Sequence
  Synthetic Oligonucleotide
gacacggtccatcacagactaaagg

SEQ ID NO: 12425 - DNA, 25 bp, Artificial Sequence
  Synthetic Oligonucleotide
ccgttgttcccttaagacagtaagg

SEQ ID NO: 12426 - DNA, 25 bp, Artificial Sequence
  Synthetic Oligonucleotide
cgtctgttccagtagaccgaaagtg

SEQ ID NO: 12427 - DNA, 25 bp, Artificial Sequence
  Synthetic Oligonucleotide
atctcctcgcagttgaccagaaagt

SEQ ID NO: 12428 - DNA, 25 bp, Artificial Sequence
  Synthetic Oligonucleotide
tctgctgcacgatcggcagctcggt

SEQ ID NO: 12429 - DNA, 25 bp, Artificial Sequence
  Synthetic Oligonucleotide
atcagccactcttgcgccggtcggt

SEQ ID NO: 12430 - DNA, 25 bp, Artificial Sequence
  Synthetic Oligonucleotide
actcgacgtgcactggcatcagcgg

SEQ ID NO: 12431 - DNA, 25 bp, Artificial Sequence
  Synthetic Oligonucleotide
cactcctagacatccatctagcggt

SEQ ID NO: 12432 - DNA, 25 bp, Artificial Sequence
  Synthetic Oligonucleotide
actcttacgaaaggagcgtatacgg

SEQ ID NO: 12433 - DNA, 25 bp, Artificial Sequence
  Synthetic Oligonucleotide
gtacttctacgctccgtggctacgg

SEQ ID NO: 12434 - DNA, 25 bp, Artificial Sequence
  Synthetic Oligonucleotide
tagtatttcgacgacttggacgagg

SEQ ID NO: 12435 - DNA, 25 bp, Artificial Sequence
  Synthetic Oligonucleotide
ttattactcgacaggtcggtgaagg

SEQ ID NO: 12436 - DNA, 25 bp, Artificial Sequence
  Synthetic Oligonucleotide
cttacatcacgagtgcgtagaacgg

SEQ ID NO: 12437 - DNA, 25 bp, Artificial Sequence
  Synthetic Oligonucleotide
acctgacaccagaactcgggaaggt

SEQ ID NO: 12438 - DNA, 25 bp, Artificial Sequence
  Synthetic Oligonucleotide
ttgaactacactaactcacgcaatg

SEQ ID NO: 12439 - DNA, 25 bp, Artificial Sequence
  Synthetic Oligonucleotide
gtagcggactcacacaagcaagtag

SEQ ID NO: 12440 - DNA, 25 bp, Artificial Sequence
  Synthetic Oligonucleotide
tgtacgggagtgtccactgcatgtg

SEQ ID NO: 12441 - DNA, 25 bp, Artificial Sequence
  Synthetic Oligonucleotide
ttcgcgagatggagactcgatttag

SEQ ID NO: 12442 - DNA, 25 bp, Artificial Sequence
  Synthetic Oligonucleotide
tgcaagtcgacgagtcgggtcttag

SEQ ID NO: 12443 - DNA, 25 bp, Artificial Sequence
  Synthetic Oligonucleotide
aagaggaagctctagtggccgttgt

SEQ ID NO: 12444 - DNA, 25 bp, Artificial Sequence
  Synthetic Oligonucleotide
cttaggcccgcctatgtgctcttat

SEQ ID NO: 12445 - DNA, 25 bp, Artificial Sequence
  Synthetic Oligonucleotide
gtcgcggccgatcagttggtctttt

SEQ ID NO: 12446 - DNA, 25 bp, Artificial Sequence
  Synthetic Oligonucleotide
gtcggggtcgtactttccatcttct

SEQ ID NO: 12447 - DNA, 25 bp, Artificial Sequence
  Synthetic Oligonucleotide
ggtcgggcgaacacgtcccaatatt

SEQ ID NO: 12448 - DNA, 25 bp, Artificial Sequence
  Synthetic Oligonucleotide
aattgggacgccgtacaccataagg

SEQ ID NO: 12449 - DNA, 25 bp, Artificial Sequence
  Synthetic Oligonucleotide
ggagagaacctatctcgaagtagtg

SEQ ID NO: 12450 - DNA, 25 bp, Artificial Sequence
  Synthetic Oligonucleotide
gagacagtacgattatccatctagg

SEQ ID NO: 12451 - DNA, 25 bp, Artificial Sequence
  Synthetic Oligonucleotide
gacgacgcgaagattgtcgtctagg

SEQ ID NO: 12452 - DNA, 25 bp, Artificial Sequence
  Synthetic Oligonucleotide
ccatgtcgtcgtggaatttacttgg

SEQ ID NO: 12453 - DNA, 25 bp, Artificial Sequence
  Synthetic Oligonucleotide
gtaaggcgctagtaatttactaggg

SEQ ID NO: 12454 - DNA, 25 bp, Artificial Sequence
  Synthetic Oligonucleotide
tgttggaccaggtgtcacatcgggt

SEQ ID NO: 12455 - DNA, 25 bp, Artificial Sequence
  Synthetic Oligonucleotide
cttgaggactggtgtccactaggtg

SEQ ID NO: 12456 - DNA, 25 bp, Artificial Sequence
  Synthetic Oligonucleotide
tcggagccgggttccctataggagt

SEQ ID NO: 12457 - DNA, 25 bp, Artificial Sequence
  Synthetic Oligonucleotide
catgggttagttccgttataggtgt

SEQ ID NO: 12458 - DNA, 25 bp, Artificial Sequence
  Synthetic Oligonucleotide
atttgtgtttgtcacgtctaaggtg

SEQ ID NO: 12459 - DNA, 25 bp, Artificial Sequence
  Synthetic Oligonucleotide
ttatggtttgtgccagacgacgtat

SEQ ID NO: 12460 - DNA, 25 bp, Artificial Sequence
  Synthetic Oligonucleotide
ttctgtcgtgctgctcgcagcagtg

SEQ ID NO: 12461 - DNA, 25 bp, Artificial Sequence
  Synthetic Oligonucleotide
agaactggtcctttgacagcagtgt

SEQ ID NO: 12462 - DNA, 25 bp, Artificial Sequence
  Synthetic Oligonucleotide
tgaacatggccaagtgctacgccgg

SEQ ID NO: 12463 - DNA, 25 bp, Artificial Sequence
  Synthetic Oligonucleotide
acagcttgaccctgtggtccggcgg

SEQ ID NO: 12464 - DNA, 25 bp, Artificial Sequence
  Synthetic Oligonucleotide
acggctagccgcagttgttgtggtt

SEQ ID NO: 12465 - DNA, 25 bp, Artificial Sequence
  Synthetic Oligonucleotide
gcggtaccccaactgtctaggtgtg

SEQ ID NO: 12466 - DNA, 25 bp, Artificial Sequence
  Synthetic Oligonucleotide
caactcgccaacaagcggcgcgtag

SEQ ID NO: 12467 - DNA, 25 bp, Artificial Sequence
  Synthetic Oligonucleotide
tttccacacagttaggtcggtctag

SEQ ID NO: 12468 - DNA, 25 bp, Artificial Sequence
  Synthetic Oligonucleotide
gacgctctaacgtggtacgttctag

SEQ ID NO: 12469 - DNA, 25 bp, Artificial Sequence
  Synthetic Oligonucleotide
gtccgtcagtcggtgtactagcttt

SEQ ID NO: 12470 - DNA, 25 bp, Artificial Sequence
  Synthetic Oligonucleotide
tggtcctcaacgcttacagttatgt

SEQ ID NO: 12471 - DNA, 25 bp, Artificial Sequence
  Synthetic Oligonucleotide
gatcctcgtacagcgagaccggctg

SEQ ID NO: 12472 - DNA, 25 bp, Artificial Sequence
  Synthetic Oligonucleotide
ttactatccttcacggctgtagctt

SEQ ID NO: 12473 - DNA, 25 bp, Artificial Sequence
  Synthetic Oligonucleotide
ttctagtgcaggacggttcagttct

SEQ ID NO: 12474 - DNA, 25 bp, Artificial Sequence
  Synthetic Oligonucleotide
ctctagcgccggacggtccaggtct

SEQ ID NO: 12475 - DNA, 25 bp, Artificial Sequence
  Synthetic Oligonucleotide
cgtgagttccggacggtcccagtgt

SEQ ID NO: 12476 - DNA, 25 bp, Artificial Sequence
  Synthetic Oligonucleotide
ggaggtacatcgaccgtaaccacgg

SEQ ID NO: 12477 - DNA, 25 bp, Artificial Sequence
  Synthetic Oligonucleotide
gagaaacatacggggtaacatcgtg

SEQ ID NO: 12478 - DNA, 25 bp, Artificial Sequence
  Synthetic Oligonucleotide
cagcagttctacgatggcaagtcct

SEQ ID NO: 12479 - DNA, 25 bp, Artificial Sequence
  Synthetic Oligonucleotide
aggacttgccatcgtagaactgctg

SEQ ID NO: 12480 - DNA, 25 bp, Artificial Sequence
  Synthetic Oligonucleotide
tctgttggaccaggagtcacatcgg

SEQ ID NO: 12481 - DNA, 25 bp, Artificial Sequence
  Synthetic Oligonucleotide
gttgcacgactggacgtggactgct

SEQ ID NO: 12482 - DNA, 25 bp, Artificial Sequence
  Synthetic Oligonucleotide
tctggtccggtccatagagactggt

SEQ ID NO: 12483 - DNA, 25 bp, Artificial Sequence
  Synthetic Oligonucleotide
tctgtcgccgattcacagttctcgg

SEQ ID NO: 12484 - DNA, 25 bp, Artificial Sequence
  Synthetic Oligonucleotide
ggtttcgccgccgctagaccgcgtg

SEQ ID NO: 12485 - DNA, 25 bp, Artificial Sequence
  Synthetic Oligonucleotide
gttacttccccagtaactaccgctg

SEQ ID NO: 12486 - DNA, 25 bp, Artificial Sequence
  Synthetic Oligonucleotide
gttacttccccagtaactaccgctg

SEQ ID NO: 12487 - DNA, 25 bp, Artificial Sequence
  Synthetic Oligonucleotide
ttacttccccagcaactaccgttgt

SEQ ID NO: 12488 - DNA, 25 bp, Artificial Sequence
  Synthetic Oligonucleotide
atatttcgtccacgtaatagcggat

SEQ ID NO: 12489 - DNA, 25 bp, Artificial Sequence
  Synthetic Oligonucleotide
acaggtgcactagtcatgtcggagt

SEQ ID NO: 12490 - DNA, 25 bp, Artificial Sequence
  Synthetic Oligonucleotide
ttacagtttgatctcagttcgagtt

SEQ ID NO: 12491 - DNA, 25 bp, Artificial Sequence
  Synthetic Oligonucleotide
ctaaattgtcatgatctattcaggt

SEQ ID NO: 12492 - DNA, 25 bp, Artificial Sequence
  Synthetic Oligonucleotide
acatagttgttatagtccttcaggt

SEQ ID NO: 12493 - DNA, 25 bp, Artificial Sequence
  Synthetic Oligonucleotide
gacgtctcttattgtcttcgtcagg

SEQ ID NO: 12494 - DNA, 25 bp, Artificial Sequence
  Synthetic Oligonucleotide
gacgacacgtccaggtccctcgggt

SEQ ID NO: 12495 - DNA, 25 bp, Artificial Sequence
  Synthetic Oligonucleotide
gtcgaccgcttggtccgatagcagt

SEQ ID NO: 12496 - DNA, 25 bp, Artificial Sequence
  Synthetic Oligonucleotide
cagtgttctcttccgtcgggaccat

SEQ ID NO: 12497 - DNA, 25 bp, Artificial Sequence
  Synthetic Oligonucleotide
ctagtctgctctagcccgcgcaagt

SEQ ID NO: 12498 - DNA, 25 bp, Artificial Sequence
  Synthetic Oligonucleotide
tgccgctctgtcgccgactcagagt

SEQ ID NO: 12499 - DNA, 25 bp, Artificial Sequence
  Synthetic Oligonucleotide
cctgctcgaacttcgccggcaccgg

SEQ ID NO: 12500 - DNA, 25 bp, Artificial Sequence
  Synthetic Oligonucleotide
tcggctagagctactaggccactgg

SEQ ID NO: 12501 - DNA, 25 bp, Artificial Sequence
  Synthetic Oligonucleotide
ggtctgagtcgtacttggaccgctg

SEQ ID NO: 12502 - DNA, 25 bp, Artificial Sequence
  Synthetic Oligonucleotide
gtattggcatctacggcgcgtcgtt

SEQ ID NO: 12503 - DNA, 25 bp, Artificial Sequence
  Synthetic Oligonucleotide
tatggaggtcgtacggagtgtcgtg

SEQ ID NO: 12504 - DNA, 25 bp, Artificial Sequence
  Synthetic Oligonucleotide
tgttctgggttgaccaggtcgtcgt

SEQ ID NO: 12505 - DNA, 25 bp, Artificial Sequence
  Synthetic Oligonucleotide
gtcaggctgctcgacacgcgtacgt

SEQ ID NO: 12506 - DNA, 25 bp, Artificial Sequence
  Synthetic Oligonucleotide
gcgctagctgctcgactacgtgtgt

SEQ ID NO: 12507 - DNA, 25 bp, Artificial Sequence
  Synthetic Oligonucleotide
gcgttgcgcgtctggacgtagaagt

SEQ ID NO: 12508 - DNA, 25 bp, Artificial Sequence
  Synthetic Oligonucleotide
tcggaaccgtcgtggtcacctacgt

SEQ ID NO: 12509 - DNA, 25 bp, Artificial Sequence
  Synthetic Oligonucleotide
ctagtgacccggcctctacgctagt

SEQ ID NO: 12510 - DNA, 25 bp, Artificial Sequence
  Synthetic Oligonucleotide
gaactggacgtacgcggccaccgtg

SEQ ID NO: 12511 - DNA, 25 bp, Artificial Sequence
  Synthetic Oligonucleotide
gtaacttgagactactttctacttg

SEQ ID NO: 12512 - DNA, 25 bp, Artificial Sequence
  Synthetic Oligonucleotide
tagacttcgacgattctttctaatg

SEQ ID NO: 12513 - DNA, 25 bp, Artificial Sequence
  Synthetic Oligonucleotide
ggccacgacgatccttactacaatt

SEQ ID NO: 12514 - DNA, 25 bp, Artificial Sequence
  Synthetic Oligonucleotide
agaagacagttaccggtaacaaatt

SEQ ID NO: 12515 - DNA, 25 bp, Artificial Sequence
  Synthetic Oligonucleotide
ctagtagagttacacgaaagacatt

SEQ ID NO: 12516 - DNA, 25 bp, Artificial Sequence
  Synthetic Oligonucleotide
ctacgaagctactaacttcgcatag

SEQ ID NO: 12517 - DNA, 25 bp, Artificial Sequence
  Synthetic Oligonucleotide
agaagagtacttgacgtggcatagt

SEQ ID NO: 12518 - DNA, 25 bp, Artificial Sequence
  Synthetic Oligonucleotide
acgagacggactagcggtacctagg

SEQ ID NO: 12519 - DNA, 25 bp, Artificial Sequence
  Synthetic Oligonucleotide
ccagagcacctatggcgtactaagg

SEQ ID NO: 12520 - DNA, 25 bp, Artificial Sequence
  Synthetic Oligonucleotide
gtcatagtcgcctagggctaagagg

SEQ ID NO: 12521 - DNA, 25 bp, Artificial Sequence
  Synthetic Oligonucleotide
tcatagtcgcctagggctaagaggt

SEQ ID NO: 12522 - DNA, 25 bp, Artificial Sequence
  Synthetic Oligonucleotide
tgtcgacccagtcgtcgacggaggt

SEQ ID NO: 12523 - DNA, 25 bp, Artificial Sequence
  Synthetic Oligonucleotide
ttacaacttacttcgtcgagaaggt

SEQ ID NO: 12524 - DNA, 25 bp, Artificial Sequence
  Synthetic Oligonucleotide
tatgtttacttatacttagagaggt

SEQ ID NO: 12525 - DNA, 25 bp, Artificial Sequence
  Synthetic Oligonucleotide
taacagttatcatagtctcgagagg

SEQ ID NO: 12526 - DNA, 25 bp, Artificial Sequence
  Synthetic Oligonucleotide
caacagttaccacagtctcgagagg

SEQ ID NO: 12527 - DNA, 25 bp, Artificial Sequence
  Synthetic Oligonucleotide
gctaaaatcgcaacgacctcgttgg

SEQ ID NO: 12528 - DNA, 25 bp, Artificial Sequence
  Synthetic Oligonucleotide
ctcaaacggtccttctacctttggt

SEQ ID NO: 12529 - DNA, 25 bp, Artificial Sequence
  Synthetic Oligonucleotide
ttaaggtacttttcatctactcgtg

SEQ ID NO: 12530 - DNA, 25 bp, Artificial Sequence
  Synthetic Oligonucleotide
aagaggttcttttacgtctgtcgtg

SEQ ID NO: 12531 - DNA, 25 bp, Artificial Sequence
  Synthetic Oligonucleotide
gaagagttctgctcgtcactctagt

SEQ ID NO: 12532 - DNA, 25 bp, Artificial Sequence
  Synthetic Oligonucleotide
cccaagtagtctgcaaccacttact

SEQ ID NO: 12533 - DNA, 25 bp, Artificial Sequence
  Synthetic Oligonucleotide
aaccggaagagctaccaccacttct

SEQ ID NO: 12534 - DNA, 25 bp, Artificial Sequence
  Synthetic Oligonucleotide
gaagtcgacgactccatcaccattt

SEQ ID NO: 12535 - DNA, 25 bp, Artificial Sequence
  Synthetic Oligonucleotide
gaggtacagcagggtcaaccattgt

SEQ ID NO: 12536 - DNA, 25 bp, Artificial Sequence
  Synthetic Oligonucleotide
ctgagtataaacattcaaccatagg

SEQ ID NO: 12537 - DNA, 25 bp, Artificial Sequence
  Synthetic Oligonucleotide
ggtaataaggatcgacgccataggt

SEQ ID NO: 12538 - DNA, 25 bp, Artificial Sequence
  Synthetic Oligonucleotide
aacttgaggactggagtccactagg

SEQ ID NO: 12539 - DNA, 25 bp, Artificial Sequence
  Synthetic Oligonucleotide
ctccttgggtatcggtcctacgtgg

SEQ ID NO: 12540 - DNA, 25 bp, Artificial Sequence
  Synthetic Oligonucleotide
cggcactttccaagagggactctgg

SEQ ID NO: 12541 - DNA, 25 bp, Artificial Sequence
  Synthetic Oligonucleotide
cggaaactccccagggaggctacgg

SEQ ID NO: 12542 - DNA, 25 bp, Artificial Sequence
  Synthetic Oligonucleotide
gtgaggaccaccacgggaaggcagt

SEQ ID NO: 12543 - DNA, 25 bp, Artificial Sequence
  Synthetic Oligonucleotide
ctggacgcacgccgcctcatggcat

SEQ ID NO: 12544 - DNA, 25 bp, Artificial Sequence
  Synthetic Oligonucleotide
tcgggaccactggtccgcgggttat

SEQ ID NO: 12545 - DNA, 25 bp, Artificial Sequence
  Synthetic Oligonucleotide
tccggtcctacctcggcggctaggt

SEQ ID NO: 12546 - DNA, 25 bp, Artificial Sequence
  Synthetic Oligonucleotide
ttcggttctatcttggtggttaggt

SEQ ID NO: 12547 - DNA, 25 bp, Artificial Sequence
  Synthetic Oligonucleotide
tctgtttagtattgcgtcggctgtg

SEQ ID NO: 12548 - DNA, 25 bp, Artificial Sequence
  Synthetic Oligonucleotide
ccgtttctactctgcgacgaccagg

SEQ ID NO: 12549 - DNA, 25 bp, Artificial Sequence
  Synthetic Oligonucleotide
tcgcttctactctgcgacgaccagg

SEQ ID NO: 12550 - DNA, 25 bp, Artificial Sequence
  Synthetic Oligonucleotide
tcgcttctactctgcgacgaccagg

SEQ ID NO: 12551 - DNA, 25 bp, Artificial Sequence
  Synthetic Oligonucleotide
tagtacctctaccacgacaaccagg

SEQ ID NO: 12552 - DNA, 25 bp, Artificial Sequence
  Synthetic Oligonucleotide
aacgagacccactcgaacactcagg

SEQ ID NO: 12553 - DNA, 25 bp, Artificial Sequence
  Synthetic Oligonucleotide
ccacgaccacttcagacacgacagg

SEQ ID NO: 12554 - DNA, 25 bp, Artificial Sequence
  Synthetic Oligonucleotide
acccggcctctacgctagtacacgg

SEQ ID NO: 12555 - DNA, 25 bp, Artificial Sequence
  Synthetic Oligonucleotide
actacacccgctcgtggaacaccgg

SEQ ID NO: 12556 - DNA, 25 bp, Artificial Sequence
  Synthetic Oligonucleotide
gcccaccgacttgcggtgaacaggg

SEQ ID NO: 12557 - DNA, 25 bp, Artificial Sequence
  Synthetic Oligonucleotide
ccgccatagactagcggaagcttgg

SEQ ID NO: 12558 - DNA, 25 bp, Artificial Sequence
  Synthetic Oligonucleotide
cccaatacttgaggtaggactattt

SEQ ID NO: 12559 - DNA, 25 bp, Artificial Sequence
  Synthetic Oligonucleotide
cccaagtccggactacgttgacatt

SEQ ID NO: 12560 - DNA, 25 bp, Artificial Sequence
  Synthetic Oligonucleotide
ccttaattggtctgtttagcgaggt

SEQ ID NO: 12561 - DNA, 25 bp, Artificial Sequence
  Synthetic Oligonucleotide
actccattagtcattctagtgcagg

SEQ ID NO: 12562 - DNA, 25 bp, Artificial Sequence
  Synthetic Oligonucleotide
cacccattaaacgcgcggacgacgg

SEQ ID NO: 12563 - DNA, 25 bp, Artificial Sequence
  Synthetic Oligonucleotide
tcgccttcacaacacgcggacgagg

SEQ ID NO: 12564 - DNA, 25 bp, Artificial Sequence
  Synthetic Oligonucleotide
tacctgcccaagtccggactacgtt

SEQ ID NO: 12565 - DNA, 25 bp, Artificial Sequence
  Synthetic Oligonucleotide
aagcgcgtaaaggtcaccgcacgtg

SEQ ID NO: 12566 - DNA, 25 bp, Artificial Sequence
  Synthetic Oligonucleotide
agaggtagaagtaccgcgactcgtg

SEQ ID NO: 12567 - DNA, 25 bp, Artificial Sequence
  Synthetic Oligonucleotide
gacgcagtagaaatcgtcggacttg

SEQ ID NO: 12568 - DNA, 25 bp, Artificial Sequence
  Synthetic Oligonucleotide
agcctagtagtcgatgtggtctctg

SEQ ID NO: 12569 - DNA, 25 bp, Artificial Sequence
  Synthetic Oligonucleotide
agtcccgtcgcctttgcgagtcgtg

SEQ ID NO: 12570 - DNA, 25 bp, Artificial Sequence
  Synthetic Oligonucleotide
gaggtaccaccacttctgcggtcat

SEQ ID NO: 12571 - DNA, 25 bp, Artificial Sequence
  Synthetic Oligonucleotide
gtgtaccacctcagtccttcttcct

SEQ ID NO: 12572 - DNA, 25 bp, Artificial Sequence
  Synthetic Oligonucleotide
ttggacgcccactacttcttgttct

SEQ ID NO: 12573 - DNA, 25 bp, Artificial Sequence
  Synthetic Oligonucleotide
gtgggtgccacaagaccgtcctttt

SEQ ID NO: 12574 - DNA, 25 bp, Artificial Sequence
  Synthetic Oligonucleotide
gacgggccgcccagtacccttattg

SEQ ID NO: 12575 - DNA, 25 bp, Artificial Sequence
  Synthetic Oligonucleotide
gcctggagagccagatcctttatgt

SEQ ID NO: 12576 - DNA, 25 bp, Artificial Sequence
  Synthetic Oligonucleotide
ccaggagagcatgatcctcgtcggg

SEQ ID NO: 12577 - DNA, 25 bp, Artificial Sequence
  Synthetic Oligonucleotide
aggagtatcgatacgtgctgggcgt

SEQ ID NO: 12578 - DNA, 25 bp, Artificial Sequence
  Synthetic Oligonucleotide
aagagctaccggaactgctgcaggt

SEQ ID NO: 12579 - DNA, 25 bp, Artificial Sequence
  Synthetic Oligonucleotide
ggaagagctaccaccacttctgagg

SEQ ID NO: 12580 - DNA, 25 bp, Artificial Sequence
  Synthetic Oligonucleotide
gagaggtcaggaaccgactcccagg

SEQ ID NO: 12581 - DNA, 25 bp, Artificial Sequence
  Synthetic Oligonucleotide
aggagagcatgactcgtcctaatgg

SEQ ID NO: 12582 - DNA, 25 bp, Artificial Sequence
  Synthetic Oligonucleotide
ggagagcatgactcgtcctaatggt

SEQ ID NO: 12583 - DNA, 25 bp, Artificial Sequence
  Synthetic Oligonucleotide
tcgtagacgcattcattgaaatggt

SEQ ID NO: 12584 - DNA, 25 bp, Artificial Sequence
  Synthetic Oligonucleotide
ccgtggagatgtttcagtcaaaggt

SEQ ID NO: 12585 - DNA, 25 bp, Artificial Sequence
  Synthetic Oligonucleotide
gtagaagagcttgtcgacgaagggt

SEQ ID NO: 12586 - DNA, 25 bp, Artificial Sequence
  Synthetic Oligonucleotide
acataagccgtggtcgcgaccgggt

SEQ ID NO: 12587 - DNA, 25 bp, Artificial Sequence
  Synthetic Oligonucleotide
tacataagccgtggtcgcgaccggg

SEQ ID NO: 12588 - DNA, 25 bp, Artificial Sequence
  Synthetic Oligonucleotide
ctacataagccgtggtcgcgaccgg

SEQ ID NO: 12589 - DNA, 25 bp, Artificial Sequence
  Synthetic Oligonucleotide
agcctcagtccgtggtccgcggagt

SEQ ID NO: 12590 - DNA, 25 bp, Artificial Sequence
  Synthetic Oligonucleotide
gtcctatctcggtggttaggtgtgt

SEQ ID NO: 12591 - DNA, 25 bp, Artificial Sequence
  Synthetic Oligonucleotide
gtcctacctcggaggctaggtgtgt

SEQ ID NO: 12592 - DNA, 25 bp, Artificial Sequence
  Synthetic Oligonucleotide
tgcgtgtccagtagtaccacgggtg

SEQ ID NO: 12593 - DNA, 25 bp, Artificial Sequence
  Synthetic Oligonucleotide
ggtgtcatatacagcgccgtgtctg

SEQ ID NO: 12594 - DNA, 25 bp, Artificial Sequence
  Synthetic Oligonucleotide
gtagcataagggtacgtctacgtgt

SEQ ID NO: 12595 - DNA, 25 bp, Artificial Sequence
  Synthetic Oligonucleotide
gtcgaataagacaaaactacgtcgt

SEQ ID NO: 12596 - DNA, 25 bp, Artificial Sequence
  Synthetic Oligonucleotide
tgtcactaacccttaacgactcgtg

SEQ ID NO: 12597 - DNA, 25 bp, Artificial Sequence
  Synthetic Oligonucleotide
gtatctatagacgcgctatccactg

SEQ ID NO: 12598 - DNA, 25 bp, Artificial Sequence
  Synthetic Oligonucleotide
ataactagtatacgtctatgaactg

SEQ ID NO: 12599 - DNA, 25 bp, Artificial Sequence
  Synthetic Oligonucleotide
ataaattacgttatgtctatgaaat

SEQ ID NO: 12600 - DNA, 25 bp, Artificial Sequence
  Synthetic Oligonucleotide
aactaattacttttgcaggaaccgt

SEQ ID NO: 12601 - DNA, 25 bp, Artificial Sequence
  Synthetic Oligonucleotide
catgatgtactcaacgggaaaacct

SEQ ID NO: 12602 - DNA, 25 bp, Artificial Sequence
  Synthetic Oligonucleotide
aagaggtacagcagggtcaaccact

SEQ ID NO: 12603 - DNA, 25 bp, Artificial Sequence
  Synthetic Oligonucleotide
gagaattagtaccggagtcaaggct

SEQ ID NO: 12604 - DNA, 25 bp, Artificial Sequence
  Synthetic Oligonucleotide
aggacttgccatcgtagaactgctg

SEQ ID NO: 12605 - DNA, 25 bp, Artificial Sequence
  Synthetic Oligonucleotide
cagcagttctacgatggcaagtcct

SEQ ID NO: 12606 - DNA, 25 bp, Artificial Sequence
  Synthetic Oligonucleotide
tctgttggaccacgagtcacatcgg

SEQ ID NO: 12607 - DNA, 25 bp, Artificial Sequence
  Synthetic Oligonucleotide
gttgcacgactgcacgtggactgct

SEQ ID NO: 12608 - DNA, 25 bp, Artificial Sequence
  Synthetic Oligonucleotide
tctggtccggtcgatagagactggt

SEQ ID NO: 12609 - DNA, 25 bp, Artificial Sequence
  Synthetic Oligonucleotide
tctgtcgccgatacacagttctcgg

SEQ ID NO: 12610 - DNA, 25 bp, Artificial Sequence
  Synthetic Oligonucleotide
ggtttcgccgcccctagaccgcgtg

SEQ ID NO: 12611 - DNA, 25 bp, Artificial Sequence
  Synthetic Oligonucleotide
gttacttccccactaactaccgctg

SEQ ID NO: 12612 - DNA, 25 bp, Artificial Sequence
  Synthetic Oligonucleotide
gttacttccccactaactaccgctg

SEQ ID NO: 12613 - DNA, 25 bp, Artificial Sequence
  Synthetic Oligonucleotide
ttacttccccaggaactaccgttgt

SEQ ID NO: 12614 - DNA, 25 bp, Artificial Sequence
  Synthetic Oligonucleotide
atatttcgtccaggtaatagcggat

SEQ ID NO: 12615 - DNA, 25 bp, Artificial Sequence
  Synthetic Oligonucleotide
acaggtgcactactcatgtcggagt

SEQ ID NO: 12616 - DNA, 25 bp, Artificial Sequence
  Synthetic Oligonucleotide
ttacagtttgatgtcagttcgagtt

SEQ ID NO: 12617 - DNA, 25 bp, Artificial Sequence
  Synthetic Oligonucleotide
ctaaattgtcatcatctattcaggt

SEQ ID NO: 12618 - DNA, 25 bp, Artificial Sequence
  Synthetic Oligonucleotide
acatagttgttaaagtccttcaggt

SEQ ID NO: 12619 - DNA, 25 bp, Artificial Sequence
  Synthetic Oligonucleotide
gacgtctcttatagtcttcgtcagg

SEQ ID NO: 12620 - DNA, 25 bp, Artificial Sequence
  Synthetic Oligonucleotide
gacgacacgtcctggtccctcgggt

SEQ ID NO: 12621 - DNA, 25 bp, Artificial Sequence
  Synthetic Oligonucleotide
gtcgaccgcttgctccgatagcagt

SEQ ID NO: 12622 - DNA, 25 bp, Artificial Sequence
  Synthetic Oligonucleotide
cagtgttctcttgcgtcgggaccat

SEQ ID NO: 12623 - DNA, 25 bp, Artificial Sequence
  Synthetic Oligonucleotide
ctagtctgctcttgcccgcgcaagt

SEQ ID NO: 12624 - DNA, 25 bp, Artificial Sequence
  Synthetic Oligonucleotide
tgccgctctgtccccgactcagagt

SEQ ID NO: 12625 - DNA, 25 bp, Artificial Sequence
  Synthetic Oligonucleotide
cctgctcgaactacgccggcaccgg

SEQ ID NO: 12626 - DNA, 25 bp, Artificial Sequence
  Synthetic Oligonucleotide
tcggctagagcttctaggccactgg

SEQ ID NO: 12627 - DNA, 25 bp, Artificial Sequence
  Synthetic Oligonucleotide
ggtctgagtcgttcttggaccgctg

SEQ ID NO: 12628 - DNA, 25 bp, Artificial Sequence
  Synthetic Oligonucleotide
gtattggcatcttcggcgcgtcgtt

SEQ ID NO: 12629 - DNA, 25 bp, Artificial Sequence
  Synthetic Oligonucleotide
tatggaggtcgttcggagtgtcgtg

SEQ ID NO: 12630 - DNA, 25 bp, Artificial Sequence
  Synthetic Oligonucleotide
tgttctgggttgtccaggtcgtcgt

SEQ ID NO: 12631 - DNA, 25 bp, Artificial Sequence
  Synthetic Oligonucleotide
gtcaggctgctccacacgcgtacgt

SEQ ID NO: 12632 - DNA, 25 bp, Artificial Sequence
  Synthetic Oligonucleotide
gcgctagctgctggactacgtgtgt

SEQ ID NO: 12633 - DNA, 25 bp, Artificial Sequence
  Synthetic Oligonucleotide
gcgttgcgcgtcaggacgtagaagt

SEQ ID NO: 12634 - DNA, 25 bp, Artificial Sequence
  Synthetic Oligonucleotide
tcggaaccgtcgaggtcacctacgt

SEQ ID NO: 12635 - DNA, 25 bp, Artificial Sequence
  Synthetic Oligonucleotide
ctagtgacccgggctctacgctagt

SEQ ID NO: 12636 - DNA, 25 bp, Artificial Sequence
  Synthetic Oligonucleotide
gaactggacgtaggcggccaccgtg

SEQ ID NO: 12637 - DNA, 25 bp, Artificial Sequence
  Synthetic Oligonucleotide
gtaacttgagacaactttctacttg

SEQ ID NO: 12638 - DNA, 25 bp, Artificial Sequence
  Synthetic Oligonucleotide
tagacttcgacgtttctttctaatg

SEQ ID NO: 12639 - DNA, 25 bp, Artificial Sequence
  Synthetic Oligonucleotide
ggccacgacgatgcttactacaatt

SEQ ID NO: 12640 - DNA, 25 bp, Artificial Sequence
  Synthetic Oligonucleotide
agaagacagttagcggtaacaaatt

SEQ ID NO: 12641 - DNA, 25 bp, Artificial Sequence
  Synthetic Oligonucleotide
ctagtagagttagacgaaagacatt

SEQ ID NO: 12642 - DNA, 25 bp, Artificial Sequence
  Synthetic Oligonucleotide
ctacgaagctacaaacttcgcatag

SEQ ID NO: 12643 - DNA, 25 bp, Artificial Sequence
  Synthetic Oligonucleotide
agaagagtacttcacgtggcatagt

SEQ ID NO: 12644 - DNA, 25 bp, Artificial Sequence
  Synthetic Oligonucleotide
acgagacggacttgcggtacctagg

SEQ ID NO: 12645 - DNA, 25 bp, Artificial Sequence
  Synthetic Oligonucleotide
ccagagcacctaaggcgtactaagg

SEQ ID NO: 12646 - DNA, 25 bp, Artificial Sequence
  Synthetic Oligonucleotide
gtcatagtcgccaagggctaagagg

SEQ ID NO: 12647 - DNA, 25 bp, Artificial Sequence
  Synthetic Oligonucleotide
tcatagtcgccttgggctaagaggt

SEQ ID NO: 12648 - DNA, 25 bp, Artificial Sequence
  Synthetic Oligonucleotide
tgtcgacccagtggtcgacggaggt

SEQ ID NO: 12649 - DNA, 25 bp, Artificial Sequence
  Synthetic Oligonucleotide
ttacaacttactacgtcgagaaggt

SEQ ID NO: 12650 - DNA, 25 bp, Artificial Sequence
  Synthetic Oligonucleotide
tatgtttacttaaacttagagaggt

SEQ ID NO: 12651 - DNA, 25 bp, Artificial Sequence
  Synthetic Oligonucleotide
taacagttatcaaagtctcgagagg

SEQ ID NO: 12652 - DNA, 25 bp, Artificial Sequence
  Synthetic Oligonucleotide
caacagttaccagagtctcgagagg

SEQ ID NO: 12653 - DNA, 25 bp, Artificial Sequence
  Synthetic Oligonucleotide
gctaaaatcgcatcgacctcgttgg

SEQ ID NO: 12654 - DNA, 25 bp, Artificial Sequence
  Synthetic Oligonucleotide
ctcaaacggtccatctacctttggt

SEQ ID NO: 12655 - DNA, 25 bp, Artificial Sequence
  Synthetic Oligonucleotide
ttaaggtactttacatctactcgtg

SEQ ID NO: 12656 - DNA, 25 bp, Artificial Sequence
  Synthetic Oligonucleotide
aagaggttctttaacgtctgtcgtg

SEQ ID NO: 12657 - DNA, 25 bp, Artificial Sequence
  Synthetic Oligonucleotide
gaagagttctgcacgtcactctagt

SEQ ID NO: 12658 - DNA, 25 bp, Artificial Sequence
  Synthetic Oligonucleotide
cccaagtagtctccaaccacttact

SEQ ID NO: 12659 - DNA, 25 bp, Artificial Sequence
  Synthetic Oligonucleotide
aaccggaagagcaaccaccacttct

SEQ ID NO: 12660 - DNA, 25 bp, Artificial Sequence
  Synthetic Oligonucleotide
gaagtcgacgacaccatcaccattt

SEQ ID NO: 12661 - DNA, 25 bp, Artificial Sequence
  Synthetic Oligonucleotide
gaggtacagcagcgtcaaccattgt

SEQ ID NO: 12662 - DNA, 25 bp, Artificial Sequence
  Synthetic Oligonucleotide
ctgagtataaactttcaaccatagg

SEQ ID NO: 12663 - DNA, 25 bp, Artificial Sequence
  Synthetic Oligonucleotide
ggtaataaggatggacgccataggt

SEQ ID NO: 12664 - DNA, 25 bp, Artificial Sequence
  Synthetic Oligonucleotide
aacttgaggactcgagtccactagg

SEQ ID NO: 12665 - DNA, 25 bp, Artificial Sequence
  Synthetic Oligonucleotide
ctccttgggtatgggtcctacgtgg

SEQ ID NO: 12666 - DNA, 25 bp, Artificial Sequence
  Synthetic Oligonucleotide
cggcactttccatgagggactctgg

SEQ ID NO: 12667 - DNA, 25 bp, Artificial Sequence
  Synthetic Oligonucleotide
cggaaactcccctgggaggctacgg

SEQ ID NO: 12668 - DNA, 25 bp, Artificial Sequence
  Synthetic Oligonucleotide
gtgaggaccacctcgggaaggcagt

SEQ ID NO: 12669 - DNA, 25 bp, Artificial Sequence
  Synthetic Oligonucleotide
ctggacgcacgcggcctcatggcat

SEQ ID NO: 12670 - DNA, 25 bp, Artificial Sequence
  Synthetic Oligonucleotide
tcgggaccactgctccgcgggttat

SEQ ID NO: 12671 - DNA, 25 bp, Artificial Sequence
  Synthetic Oligonucleotide
tccggtcctaccacggcggctaggt

SEQ ID NO: 12672 - DNA, 25 bp, Artificial Sequence
  Synthetic Oligonucleotide
ttcggttctatcatggtggttaggt

SEQ ID NO: 12673 - DNA, 25 bp, Artificial Sequence
  Synthetic Oligonucleotide
tctgtttagtatagcgtcggctgtg

SEQ ID NO: 12674 - DNA, 25 bp, Artificial Sequence
  Synthetic Oligonucleotide
ccgtttctactcagcgacgaccagg

SEQ ID NO: 12675 - DNA, 25 bp, Artificial Sequence
  Synthetic Oligonucleotide
tcgcttctactcagcgacgaccagg

SEQ ID NO: 12676 - DNA, 25 bp, Artificial Sequence
  Synthetic Oligonucleotide
tcgcttctactcagcgacgaccagg

SEQ ID NO: 12677 - DNA, 25 bp, Artificial Sequence
  Synthetic Oligonucleotide
tagtacctctacgacgacaaccagg

SEQ ID NO: 12678 - DNA, 25 bp, Artificial Sequence
  Synthetic Oligonucleotide
aacgagacccacacgaacactcagg

SEQ ID NO: 12679 - DNA, 25 bp, Artificial Sequence
  Synthetic Oligonucleotide
ccacgaccacttgagacacgacagg

SEQ ID NO: 12680 - DNA, 25 bp, Artificial Sequence
  Synthetic Oligonucleotide
acccggcctctaggctagtacacgg

SEQ ID NO: 12681 - DNA, 25 bp, Artificial Sequence
  Synthetic Oligonucleotide
actacacccgctggtggaacaccgg

SEQ ID NO: 12682 - DNA, 25 bp, Artificial Sequence
  Synthetic Oligonucleotide
gcccaccgacttccggtgaacaggg

SEQ ID NO: 12683 - DNA, 25 bp, Artificial Sequence
  Synthetic Oligonucleotide
ccgccatagacttgcggaagcttgg

SEQ ID NO: 12684 - DNA, 25 bp, Artificial Sequence
  Synthetic Oligonucleotide
cccaatacttgacgtaggactattt

SEQ ID NO: 12685 - DNA, 25 bp, Artificial Sequence
  Synthetic Oligonucleotide
cccaagtccggagtacgttgacatt

SEQ ID NO: 12686 - DNA, 25 bp, Artificial Sequence
  Synthetic Oligonucleotide
ccttaattggtcagtttagcgaggt

SEQ ID NO: 12687 - DNA, 25 bp, Artificial Sequence
  Synthetic Oligonucleotide
actccattagtctttctagtgcagg

SEQ ID NO: 12688 - DNA, 25 bp, Artificial Sequence
  Synthetic Oligonucleotide
cacccattaaacccgcggacgacgg

SEQ ID NO: 12689 - DNA, 25 bp, Artificial Sequence
  Synthetic Oligonucleotide
tcgccttcacaagacgcggacgagg

SEQ ID NO: 12690 - DNA, 25 bp, Artificial Sequence
  Synthetic Oligonucleotide
tacctgcccaagaccggactacgtt

SEQ ID NO: 12691 - DNA, 25 bp, Artificial Sequence
  Synthetic Oligonucleotide
aagcgcgtaaagctcaccgcacgtg

SEQ ID NO: 12692 - DNA, 25 bp, Artificial Sequence
  Synthetic Oligonucleotide
agaggtagaagttccgcgactcgtg

SEQ ID NO: 12693 - DNA, 25 bp, Artificial Sequence
  Synthetic Oligonucleotide
gacgcagtagaattcgtcggacttg

SEQ ID NO: 12694 - DNA, 25 bp, Artificial Sequence
  Synthetic Oligonucleotide
agcctagtagtccatgtggtctctg

SEQ ID NO: 12695 - DNA, 25 bp, Artificial Sequence
  Synthetic Oligonucleotide
agtcccgtcgccattgcgagtcgtg

SEQ ID NO: 12696 - DNA, 25 bp, Artificial Sequence
  Synthetic Oligonucleotide
gaggtaccaccagttctgcggtcat

SEQ ID NO: 12697 - DNA, 25 bp, Artificial Sequence
  Synthetic Oligonucleotide
gtgtaccacctctgtccttcttcct

SEQ ID NO: 12698 - DNA, 25 bp, Artificial Sequence
  Synthetic Oligonucleotide
ttggacgcccacaacttcttgttct

SEQ ID NO: 12699 - DNA, 25 bp, Artificial Sequence
  Synthetic Oligonucleotide
gtgggtgccacatgaccgtcctttt

SEQ ID NO: 12700 - DNA, 25 bp, Artificial Sequence
  Synthetic Oligonucleotide
gacgggccgccctgtacccttattg

SEQ ID NO: 12701 - DNA, 25 bp, Artificial Sequence
  Synthetic Oligonucleotide
gcctggagagcctgatcctttatgt

SEQ ID NO: 12702 - DNA, 25 bp, Artificial Sequence
  Synthetic Oligonucleotide
ccaggagagcatcatcctcgtcggg

SEQ ID NO: 12703 - DNA, 25 bp, Artificial Sequence
  Synthetic Oligonucleotide
aggagtatcgattcgtgctgggcgt

SEQ ID NO: 12704 - DNA, 25 bp, Artificial Sequence
  Synthetic Oligonucleotide
aagagctaccggtactgctgcaggt

SEQ ID NO: 12705 - DNA, 25 bp, Artificial Sequence
  Synthetic Oligonucleotide
ggaagagctacctccacttctgagg

SEQ ID NO: 12706 - DNA, 25 bp, Artificial Sequence
  Synthetic Oligonucleotide
gagaggtcaggatccgactcccagg

SEQ ID NO: 12707 - DNA, 25 bp, Artificial Sequence
  Synthetic Oligonucleotide
aggagagcatgagtcgtcctaatgg

SEQ ID NO: 12708 - DNA, 25 bp, Artificial Sequence
  Synthetic Oligonucleotide
ggagagcatgacacgtcctaatggt

SEQ ID NO: 12709 - DNA, 25 bp, Artificial Sequence
  Synthetic Oligonucleotide
tcgtagacgcatacattgaaatggt

SEQ ID NO: 12710 - DNA, 25 bp, Artificial Sequence
  Synthetic Oligonucleotide
ccgtggagatgtatcagtcaaaggt

SEQ ID NO: 12711 - DNA, 25 bp, Artificial Sequence
  Synthetic Oligonucleotide
gtagaagagcttctcgacgaagggt

SEQ ID NO: 12712 - DNA, 25 bp, Artificial Sequence
  Synthetic Oligonucleotide
acataagccgtgctcgcgaccgggt

SEQ ID NO: 12713 - DNA, 25 bp, Artificial Sequence
  Synthetic Oligonucleotide
tacataagccgtcgtcgcgaccggg

SEQ ID NO: 12714 - DNA, 25 bp, Artificial Sequence
  Synthetic Oligonucleotide
ctacataagccgaggtcgcgaccgg

SEQ ID NO: 12715 - DNA, 25 bp, Artificial Sequence
  Synthetic Oligonucleotide
agcctcagtccgaggtccgcggagt

SEQ ID NO: 12716 - DNA, 25 bp, Artificial Sequence
  Synthetic Oligonucleotide
gtcctatctcggaggttaggtgtgt

SEQ ID NO: 12717 - DNA, 25 bp, Artificial Sequence
  Synthetic Oligonucleotide
gtcctacctcggtggctaggtgtgt

SEQ ID NO: 12718 - DNA, 25 bp, Artificial Sequence
  Synthetic Oligonucleotide
tgcgtgtccagttgtaccacgggtg

SEQ ID NO: 12719 - DNA, 25 bp, Artificial Sequence
  Synthetic Oligonucleotide
ggtgtcatatactgcgccgtgtctg

SEQ ID NO: 12720 - DNA, 25 bp, Artificial Sequence
  Synthetic Oligonucleotide
gtagcataagggaacgtctacgtgt

SEQ ID NO: 12721 - DNA, 25 bp, Artificial Sequence
  Synthetic Oligonucleotide
gtcgaataagactaaactacgtcgt

SEQ ID NO: 12722 - DNA, 25 bp, Artificial Sequence
  Synthetic Oligonucleotide
tgtcactaacccataacgactcgtg

SEQ ID NO: 12723 - DNA, 25 bp, Artificial Sequence
  Synthetic Oligonucleotide
gtatctatagacccgctatccactg

SEQ ID NO: 12724 - DNA, 25 bp, Artificial Sequence
  Synthetic Oligonucleotide
ataactagtataggtctatgaactg

SEQ ID NO: 12725 - DNA, 25 bp, Artificial Sequence
  Synthetic Oligonucleotide
ataaattacgttttgtctatgaaat

SEQ ID NO: 12726 - DNA, 25 bp, Artificial Sequence
  Synthetic Oligonucleotide
aactaattacttatgcaggaaccgt

SEQ ID NO: 12727 - DNA, 25 bp, Artificial Sequence
  Synthetic Oligonucleotide
catgatgtactctacgggaaaacct

SEQ ID NO: 12728 - DNA, 25 bp, Artificial Sequence
  Synthetic Oligonucleotide
aagaggtacagctgggtcaaccact

SEQ ID NO: 12729 - DNA, 25 bp, Artificial Sequence
  Synthetic Oligonucleotide
gagaattagtacgggagtcaaggct

SEQ ID NO: 12730 - DNA, 25 bp, Artificial Sequence
  Synthetic Oligonucleotide
cagcagttctacgatggcaagtcct

SEQ ID NO: 12731 - DNA, 25 bp, Artificial Sequence
  Synthetic Oligonucleotide
aggacttgccatcgtagaactgctg

SEQ ID NO: 12732 - DNA, 25 bp, Artificial Sequence
  Synthetic Oligonucleotide
ttaatggcgccgacgaccgtggtct

SEQ ID NO: 12733 - DNA, 25 bp, Artificial Sequence
  Synthetic Oligonucleotide
tgagacgaccgtccaacgaggtcgt

SEQ ID NO: 12734 - DNA, 25 bp, Artificial Sequence
  Synthetic Oligonucleotide
tcgttactcctataacgactgtcgt

SEQ ID NO: 12735 - DNA, 25 bp, Artificial Sequence
  Synthetic Oligonucleotide
cttcgccgacctgaagtacatccgt

SEQ ID NO: 12736 - DNA, 25 bp, Artificial Sequence
  Synthetic Oligonucleotide
cttcttcggaagaggaacagtcact

SEQ ID NO: 12737 - DNA, 25 bp, Artificial Sequence
  Synthetic Oligonucleotide
agttgccagaaaacccaccgtcact

SEQ ID NO: 12738 - DNA, 25 bp, Artificial Sequence
  Synthetic Oligonucleotide
aggtgccagaagacccaccgtcact

SEQ ID NO: 12739 - DNA, 25 bp, Artificial Sequence
  Synthetic Oligonucleotide
aggtgtcagaagacccaccgtcact

SEQ ID NO: 12740 - DNA, 25 bp, Artificial Sequence
  Synthetic Oligonucleotide
tagttgtctcaagtcttcccagact

SEQ ID NO: 12741 - DNA, 25 bp, Artificial Sequence
  Synthetic Oligonucleotide
tagtctgcaaccacttacttccgat

SEQ ID NO: 12742 - DNA, 25 bp, Artificial Sequence
  Synthetic Oligonucleotide
ttaccgcactccatctctctttggt

SEQ ID NO: 12743 - DNA, 25 bp, Artificial Sequence
  Synthetic Oligonucleotide
ttctttcctcaaatctacgttgcgg

SEQ ID NO: 12744 - DNA, 25 bp, Artificial Sequence
  Synthetic Oligonucleotide
atctttcccatctacactggtagtg

SEQ ID NO: 12745 - DNA, 25 bp, Artificial Sequence
  Synthetic Oligonucleotide
tctgttctcctaccacttttgagtg

SEQ ID NO: 12746 - DNA, 25 bp, Artificial Sequence
  Synthetic Oligonucleotide
ccggttctacctcggtggctaggtg

SEQ ID NO: 12747 - DNA, 25 bp, Artificial Sequence
  Synthetic Oligonucleotide
cgggtgtatccttaggaagactggg

SEQ ID NO: 12748 - DNA, 25 bp, Artificial Sequence
  Synthetic Oligonucleotide
agagaggttcacgagggagattgtg

SEQ ID NO: 12749 - DNA, 25 bp, Artificial Sequence
  Synthetic Oligonucleotide
atctaggtctcagaagcattggtat

SEQ ID NO: 12750 - DNA, 25 bp, Artificial Sequence
  Synthetic Oligonucleotide
ggggtgactcctgttgcaatggtat

SEQ ID NO: 12751 - DNA, 25 bp, Artificial Sequence
  Synthetic Oligonucleotide
gggaacatcattacccgaaagtcct

SEQ ID NO: 12752 - DNA, 25 bp, Artificial Sequence
  Synthetic Oligonucleotide
gacgcgttcaatccaaaacagttct

SEQ ID NO: 12753 - DNA, 25 bp, Artificial Sequence
  Synthetic Oligonucleotide
cccgttgagagttaagcaacatctt

SEQ ID NO: 12754 - DNA, 25 bp, Artificial Sequence
  Synthetic Oligonucleotide
cgtttagtagagctaaaatacccat

SEQ ID NO: 12755 - DNA, 25 bp, Artificial Sequence
  Synthetic Oligonucleotide
tccggagtctaacatacgtcacggt

SEQ ID NO: 12756 - DNA, 25 bp, Artificial Sequence
  Synthetic Oligonucleotide
ttatcagggtatcgtctatgaaggt

SEQ ID NO: 12757 - DNA, 25 bp, Artificial Sequence
  Synthetic Oligonucleotide
tttctgctagtgtcgttatcagggt

SEQ ID NO: 12758 - DNA, 25 bp, Artificial Sequence
  Synthetic Oligonucleotide
ttgctgtctgtgtctggtctgaggt

SEQ ID NO: 12759 - DNA, 25 bp, Artificial Sequence
  Synthetic Oligonucleotide
cacgttttgtacaggtctgagtcgt

SEQ ID NO: 12760 - DNA, 25 bp, Artificial Sequence
  Synthetic Oligonucleotide
acgaagtatgacagtgtaacaacgt

SEQ ID NO: 12761 - DNA, 25 bp, Artificial Sequence
  Synthetic Oligonucleotide
gaagactatggaggtcgtacggagt

SEQ ID NO: 12762 - DNA, 25 bp, Artificial Sequence
  Synthetic Oligonucleotide
agaagtatgtgcgccgtaccgacgt

SEQ ID NO: 12763 - DNA, 25 bp, Artificial Sequence
  Synthetic Oligonucleotide
ttgggtcctagtacccgtaccacgt

SEQ ID NO: 12764 - DNA, 25 bp, Artificial Sequence
  Synthetic Oligonucleotide
tcgttgtcctgatcctactcatcgt

SEQ ID NO: 12765 - DNA, 25 bp, Artificial Sequence
  Synthetic Oligonucleotide
gtgtaacgagtgtcactcgaagtgt

SEQ ID NO: 12766 - DNA, 25 bp, Artificial Sequence
  Synthetic Oligonucleotide
gtgacgtagaagtgtcgctcaagtt

SEQ ID NO: 12767 - DNA, 25 bp, Artificial Sequence
  Synthetic Oligonucleotide
acctagaagcggaagtgcaacagtt

SEQ ID NO: 12768 - DNA, 25 bp, Artificial Sequence
  Synthetic Oligonucleotide
cctataggagcagtcggtaagagtt

SEQ ID NO: 12769 - DNA, 25 bp, Artificial Sequence
  Synthetic Oligonucleotide
ccacaagaagaccccgttgagagtt

SEQ ID NO: 12770 - DNA, 25 bp, Artificial Sequence
  Synthetic Oligonucleotide
ccggagggacttcgttcgagacgct

SEQ ID NO: 12771 - DNA, 25 bp, Artificial Sequence
  Synthetic Oligonucleotide
accaacgaccctaaacttgagacct

SEQ ID NO: 12772 - DNA, 25 bp, Artificial Sequence
  Synthetic Oligonucleotide
gccaagctcccgtctagtatcaact

SEQ ID NO: 12773 - DNA, 25 bp, Artificial Sequence
  Synthetic Oligonucleotide
gtccacagcggcagccttaacttct

SEQ ID NO: 12774 - DNA, 25 bp, Artificial Sequence
  Synthetic Oligonucleotide
agcagtagtcgagagccggaacttt

SEQ ID NO: 12775 - DNA, 25 bp, Artificial Sequence
  Synthetic Oligonucleotide
tcatgtgacatcgacagaagtctgt

SEQ ID NO: 12776 - DNA, 25 bp, Artificial Sequence
  Synthetic Oligonucleotide
tacccaagggactccaccgggtctt

SEQ ID NO: 12777 - DNA, 25 bp, Artificial Sequence
  Synthetic Oligonucleotide
ctcgaaaggactaccaggcagttgt

SEQ ID NO: 12778 - DNA, 25 bp, Artificial Sequence
  Synthetic Oligonucleotide
atcaaagatcaataggcgacgtgtg

SEQ ID NO: 12779 - DNA, 25 bp, Artificial Sequence
  Synthetic Oligonucleotide
tcaaagatcaataggcgacgtgtgt

SEQ ID NO: 12780 - DNA, 25 bp, Artificial Sequence
  Synthetic Oligonucleotide
acagaggtccataccggtctgtagt

SEQ ID NO: 12781 - DNA, 25 bp, Artificial Sequence
  Synthetic Oligonucleotide
ttgacagcggtctcttctacttttt

SEQ ID NO: 12782 - DNA, 25 bp, Artificial Sequence
  Synthetic Oligonucleotide
cacgaaaggttcgtattattcgttt

SEQ ID NO: 12783 - DNA, 25 bp, Artificial Sequence
  Synthetic Oligonucleotide
ccaagaagggcctttcggcgtagat

SEQ ID NO: 12784 - DNA, 25 bp, Artificial Sequence
  Synthetic Oligonucleotide
agggaaagctaccaccggacgtatt

SEQ ID NO: 12785 - DNA, 25 bp, Artificial Sequence
  Synthetic Oligonucleotide
tacgggagctgctggaccggcttct

SEQ ID NO: 12786 - DNA, 25 bp, Artificial Sequence
  Synthetic Oligonucleotide
gcggcggctgccagtacagcttctt

SEQ ID NO: 12787 - DNA, 25 bp, Artificial Sequence
  Synthetic Oligonucleotide
tgcggctaggaacgttcaccttgtg

SEQ ID NO: 12788 - DNA, 25 bp, Artificial Sequence
  Synthetic Oligonucleotide
gcggctaggaacgttcaccttgtgt

SEQ ID NO: 12789 - DNA, 25 bp, Artificial Sequence
  Synthetic Oligonucleotide
cgccgggtgctacctgcccttgtgt

SEQ ID NO: 12790 - DNA, 25 bp, Artificial Sequence
  Synthetic Oligonucleotide
cccgacgaggatcatgctctcctgg

SEQ ID NO: 12791 - DNA, 25 bp, Artificial Sequence
  Synthetic Oligonucleotide
cttgagtcggttcggcgtccacagg

SEQ ID NO: 12792 - DNA, 25 bp, Artificial Sequence
  Synthetic Oligonucleotide
ctcgagtctgtctcgggcacccggt

SEQ ID NO: 12793 - DNA, 25 bp, Artificial Sequence
  Synthetic Oligonucleotide
gacattctacggtcgggaccccggt

SEQ ID NO: 12794 - DNA, 25 bp, Artificial Sequence
  Synthetic Oligonucleotide
gacgtttaccgtcgggaccactggt

SEQ ID NO: 12795 - DNA, 25 bp, Artificial Sequence
  Synthetic Oligonucleotide
cgtcctaggtgtcctgaccccgagt

SEQ ID NO: 12796 - DNA, 25 bp, Artificial Sequence
  Synthetic Oligonucleotide
gtgtccacggtccggtgccggttat

SEQ ID NO: 12797 - DNA, 25 bp, Artificial Sequence
  Synthetic Oligonucleotide
ggttgggacaatctggccgttctgt

SEQ ID NO: 12798 - DNA, 25 bp, Artificial Sequence
  Synthetic Oligonucleotide
gggacgaatcgaaggctctagtctg

SEQ ID NO: 12799 - DNA, 25 bp, Artificial Sequence
  Synthetic Oligonucleotide
cggacgataccaagtcgctgcggtg

SEQ ID NO: 12800 - DNA, 25 bp, Artificial Sequence
  Synthetic Oligonucleotide
cacgtcctcctactctctgtggtgt

SEQ ID NO: 12801 - DNA, 25 bp, Artificial Sequence
  Synthetic Oligonucleotide
acagttaccacagtctactgaggtg

SEQ ID NO: 12802 - DNA, 25 bp, Artificial Sequence
  Synthetic Oligonucleotide
caatagttaccacagtcttgagagg

SEQ ID NO: 12803 - DNA, 25 bp, Artificial Sequence
  Synthetic Oligonucleotide
caacagttaccacagacttgagagg

SEQ ID NO: 12804 - DNA, 25 bp, Artificial Sequence
  Synthetic Oligonucleotide
gaactactcccaaaaccacagtagg

SEQ ID NO: 12805 - DNA, 25 bp, Artificial Sequence
  Synthetic Oligonucleotide
agttttacaccacaagcaagacggt

SEQ ID NO: 12806 - DNA, 25 bp, Artificial Sequence
  Synthetic Oligonucleotide
attatctgagcgtttaaccaaacgg

SEQ ID NO: 12807 - DNA, 25 bp, Artificial Sequence
  Synthetic Oligonucleotide
taactgtcgcttaagcgcgtaaagg

SEQ ID NO: 12808 - DNA, 25 bp, Artificial Sequence
  Synthetic Oligonucleotide
gctccagtcggtcctgctgaagagg

SEQ ID NO: 12809 - DNA, 25 bp, Artificial Sequence
  Synthetic Oligonucleotide
ggtcggtggtcgaacgtactagagg

SEQ ID NO: 12810 - DNA, 25 bp, Artificial Sequence
  Synthetic Oligonucleotide
ctgtcggtacgtcgtggacagagtg

SEQ ID NO: 12811 - DNA, 25 bp, Artificial Sequence
  Synthetic Oligonucleotide
ccaggtatagtagtcgtagcaatgt

SEQ ID NO: 12812 - DNA, 25 bp, Artificial Sequence
  Synthetic Oligonucleotide
agatcgtcggtagtcgttctcatgt

SEQ ID NO: 12813 - DNA, 25 bp, Artificial Sequence
  Synthetic Oligonucleotide
aaaatcgtaagttacttttaccgtg

SEQ ID NO: 12814 - DNA, 25 bp, Artificial Sequence
  Synthetic Oligonucleotide
aaactgacataatggttacagtcgt

SEQ ID NO: 12815 - DNA, 25 bp, Artificial Sequence
  Synthetic Oligonucleotide
tcgaaatacaaagatgtcgtcatgt

SEQ ID NO: 12816 - DNA, 25 bp, Artificial Sequence
  Synthetic Oligonucleotide
gctcccactaccagaaaggccagtt

SEQ ID NO: 12817 - DNA, 25 bp, Artificial Sequence
  Synthetic Oligonucleotide
gctcccactaccagaaaggccagtt

SEQ ID NO: 12818 - DNA, 25 bp, Artificial Sequence
  Synthetic Oligonucleotide
tccaccgtaccgaaggtgccgagtg

SEQ ID NO: 12819 - DNA, 25 bp, Artificial Sequence
  Synthetic Oligonucleotide
gccccggcgtagcacatggccatgt

SEQ ID NO: 12820 - DNA, 25 bp, Artificial Sequence
  Synthetic Oligonucleotide
cctcggtggctaggtgtgtctcatg

SEQ ID NO: 12821 - DNA, 25 bp, Artificial Sequence
  Synthetic Oligonucleotide
cctcggtcgcgtcatggtgcaccgg

SEQ ID NO: 12822 - DNA, 25 bp, Artificial Sequence
  Synthetic Oligonucleotide
gcttctcgaggtactgctgcgccgg

SEQ ID NO: 12823 - DNA, 25 bp, Artificial Sequence
  Synthetic Oligonucleotide
tgtctcgagtctctgtcttgtccgg

SEQ ID NO: 12824 - DNA, 25 bp, Artificial Sequence
  Synthetic Oligonucleotide
ttgactcatactaactttcttcctt

SEQ ID NO: 12825 - DNA, 25 bp, Artificial Sequence
  Synthetic Oligonucleotide
ggtccatctataaagtcttcgttct

SEQ ID NO: 12826 - DNA, 25 bp, Artificial Sequence
  Synthetic Oligonucleotide
accttccatcagtttcttcggttct

SEQ ID NO: 12827 - DNA, 25 bp, Artificial Sequence
  Synthetic Oligonucleotide
cctcccatcagtctcttcgagagtt

SEQ ID NO: 12828 - DNA, 25 bp, Artificial Sequence
  Synthetic Oligonucleotide
gtccctactacaagacccgtcgggg

SEQ ID NO: 12829 - DNA, 25 bp, Artificial Sequence
  Synthetic Oligonucleotide
cccggtcccgacattcttcgggggt

SEQ ID NO: 12830 - DNA, 25 bp, Artificial Sequence
  Synthetic Oligonucleotide
acctgccaccagtactccgggaggt

SEQ ID NO: 12831 - DNA, 25 bp, Artificial Sequence
  Synthetic Oligonucleotide
cctgagttgctgtatcagccgaggt

SEQ ID NO: 12832 - DNA, 25 bp, Artificial Sequence
  Synthetic Oligonucleotide
tgtgtcagttgtagtctgccgaggt

SEQ ID NO: 12833 - DNA, 25 bp, Artificial Sequence
  Synthetic Oligonucleotide
cgcgtaaatgacagttgttctatgt

SEQ ID NO: 12834 - DNA, 25 bp, Artificial Sequence
  Synthetic Oligonucleotide
gcaagtccgacgatttctactgcgt

SEQ ID NO: 12835 - DNA, 25 bp, Artificial Sequence
  Synthetic Oligonucleotide
ccccagtaactaccgttgttatagg

SEQ ID NO: 12836 - DNA, 25 bp, Artificial Sequence
  Synthetic Oligonucleotide
ttcgcgctaaagtatctttaatagg

SEQ ID NO: 12837 - DNA, 25 bp, Artificial Sequence
  Synthetic Oligonucleotide
catcggttccggtgttttaataggt

SEQ ID NO: 12838 - DNA, 25 bp, Artificial Sequence
  Synthetic Oligonucleotide
tcgagatcttaatggtgtcaatagg

SEQ ID NO: 12839 - DNA, 25 bp, Artificial Sequence
  Synthetic Oligonucleotide
ttctgctccaactcggtcagaggtt

SEQ ID NO: 12840 - DNA, 25 bp, Artificial Sequence
  Synthetic Oligonucleotide
ttcaggaccaagcggttctcggtgt

SEQ ID NO: 12841 - DNA, 25 bp, Artificial Sequence
  Synthetic Oligonucleotide
gaccgtccaacgaggtcgttgcgat

SEQ ID NO: 12842 - DNA, 25 bp, Artificial Sequence
  Synthetic Oligonucleotide
taccatcgaagcgccgttacggact

SEQ ID NO: 12843 - DNA, 25 bp, Artificial Sequence
  Synthetic Oligonucleotide
acgaccagctgggccctgtgcacgt

SEQ ID NO: 12844 - DNA, 25 bp, Artificial Sequence
  Synthetic Oligonucleotide
cacgccggctcgaggcttgtgaagt

SEQ ID NO: 12845 - DNA, 25 bp, Artificial Sequence
  Synthetic Oligonucleotide
acccgttactgtagcgctggggagt

SEQ ID NO: 12846 - DNA, 25 bp, Artificial Sequence
  Synthetic Oligonucleotide
ggtcctcgaatgaccggtggtgcct

SEQ ID NO: 12847 - DNA, 25 bp, Artificial Sequence
  Synthetic Oligonucleotide
tgctcgagttgtagcagggagacct

SEQ ID NO: 12848 - DNA, 25 bp, Artificial Sequence
  Synthetic Oligonucleotide
ctcgcgtaagcctagggagtacact

SEQ ID NO: 12849 - DNA, 25 bp, Artificial Sequence
  Synthetic Oligonucleotide
agggtagacccgtgtaggctaccgt

SEQ ID NO: 12850 - DNA, 25 bp, Artificial Sequence
  Synthetic Oligonucleotide
atgcacgaacggtagatcggtccgt

SEQ ID NO: 12851 - DNA, 25 bp, Artificial Sequence
  Synthetic Oligonucleotide
tatgcacctactaaacatacatcct

SEQ ID NO: 12852 - DNA, 25 bp, Artificial Sequence
  Synthetic Oligonucleotide
ttcttgtcccacaagaagaccccgt

SEQ ID NO: 12853 - DNA, 25 bp, Artificial Sequence
  Synthetic Oligonucleotide
ttcacttcccacctgaggaagacct

SEQ ID NO: 12854 - DNA, 25 bp, Artificial Sequence
  Synthetic Oligonucleotide
tacaaccgccctagagcgaggacct

SEQ ID NO: 12855 - DNA, 25 bp, Artificial Sequence
  Synthetic Oligonucleotide
agacaggcctacggacgcagccgct

SEQ ID NO: 12856 - DNA, 25 bp, Artificial Sequence
  Synthetic Oligonucleotide
aggacttgccatcgtagaactgctg

SEQ ID NO: 12857 - DNA, 25 bp, Artificial Sequence
  Synthetic Oligonucleotide
cagcagttctacgatggcaagtcct

SEQ ID NO: 12858 - DNA, 25 bp, Artificial Sequence
  Synthetic Oligonucleotide
ttaatggcgccgtcgaccgtggtct

SEQ ID NO: 12859 - DNA, 25 bp, Artificial Sequence
  Synthetic Oligonucleotide
tgagacgaccgtgcaacgaggtcgt

SEQ ID NO: 12860 - DNA, 25 bp, Artificial Sequence
  Synthetic Oligonucleotide
tcgttactcctaaaacgactgtcgt

SEQ ID NO: 12861 - DNA, 25 bp, Artificial Sequence
  Synthetic Oligonucleotide
cttcgccgacctcaagtacatccgt

SEQ ID NO: 12862 - DNA, 25 bp, Artificial Sequence
  Synthetic Oligonucleotide
cttcttcggaagtggaacagtcact

SEQ ID NO: 12863 - DNA, 25 bp, Artificial Sequence
  Synthetic Oligonucleotide
agttgccagaaatcccaccgtcact

SEQ ID NO: 12864 - DNA, 25 bp, Artificial Sequence
  Synthetic Oligonucleotide
aggtgccagaagtcccaccgtcact

SEQ ID NO: 12865 - DNA, 25 bp, Artificial Sequence
  Synthetic Oligonucleotide
aggtgtcagaagtcccaccgtcact

SEQ ID NO: 12866 - DNA, 25 bp, Artificial Sequence
  Synthetic Oligonucleotide
tagttgtctcaactcttcccagact

SEQ ID NO: 12867 - DNA, 25 bp, Artificial Sequence
  Synthetic Oligonucleotide
tagtctgcaacctcttacttccgat

SEQ ID NO: 12868 - DNA, 25 bp, Artificial Sequence
  Synthetic Oligonucleotide
ttaccgcactccttctctctttggt

SEQ ID NO: 12869 - DNA, 25 bp, Artificial Sequence
  Synthetic Oligonucleotide
ttctttcctcaattctacgttgcgg

SEQ ID NO: 12870 - DNA, 25 bp, Artificial Sequence
  Synthetic Oligonucleotide
atctttcccatcaacactggtagtg

SEQ ID NO: 12871 - DNA, 25 bp, Artificial Sequence
  Synthetic Oligonucleotide
tctgttctcctagcacttttgagtg

SEQ ID NO: 12872 - DNA, 25 bp, Artificial Sequence
  Synthetic Oligonucleotide
ccggttctacctgggtggctaggtg

SEQ ID NO: 12873 - DNA, 25 bp, Artificial Sequence
  Synthetic Oligonucleotide
cgggtgtatcctaaggaagactggg

SEQ ID NO: 12874 - DNA, 25 bp, Artificial Sequence
  Synthetic Oligonucleotide
agagaggttcaccagggagattgtg

SEQ ID NO: 12875 - DNA, 25 bp, Artificial Sequence
  Synthetic Oligonucleotide
atctaggtctcacaagcattggtat

SEQ ID NO: 12876 - DNA, 25 bp, Artificial Sequence
  Synthetic Oligonucleotide
ggggtgactcctcttgcaatggtat

SEQ ID NO: 12877 - DNA, 25 bp, Artificial Sequence
  Synthetic Oligonucleotide
gggaacatcatttcccgaaagtcct

SEQ ID NO: 12878 - DNA, 25 bp, Artificial Sequence
  Synthetic Oligonucleotide
gacgcgttcaatgcaaaacagttct

SEQ ID NO: 12879 - DNA, 25 bp, Artificial Sequence
  Synthetic Oligonucleotide
cccgttgagagtaaagcaacatctt

SEQ ID NO: 12880 - DNA, 25 bp, Artificial Sequence
  Synthetic Oligonucleotide
cgtttagtagaggtaaaatacccat

SEQ ID NO: 12881 - DNA, 25 bp, Artificial Sequence
  Synthetic Oligonucleotide
tccggagtctaagatacgtcacggt

SEQ ID NO: 12882 - DNA, 25 bp, Artificial Sequence
  Synthetic Oligonucleotide
ttatcagggtatggtctatgaaggt

SEQ ID NO: 12883 - DNA, 25 bp, Artificial Sequence
  Synthetic Oligonucleotide
tttctgctagtgacgttatcagggt

SEQ ID NO: 12884 - DNA, 25 bp, Artificial Sequence
  Synthetic Oligonucleotide
ttgctgtctgtgactggtctgaggt

SEQ ID NO: 12885 - DNA, 25 bp, Artificial Sequence
  Synthetic Oligonucleotide
cacgttttgtactggtctgagtcgt

SEQ ID NO: 12886 - DNA, 25 bp, Artificial Sequence
  Synthetic Oligonucleotide
acgaagtatgactgtgtaacaacgt

SEQ ID NO: 12887 - DNA, 25 bp, Artificial Sequence
  Synthetic Oligonucleotide
gaagactatggacgtcgtacggagt

SEQ ID NO: 12888 - DNA, 25 bp, Artificial Sequence
  Synthetic Oligonucleotide
agaagtatgtgccccgtaccgacgt

SEQ ID NO: 12889 - DNA, 25 bp, Artificial Sequence
  Synthetic Oligonucleotide
ttgggtcctagttcccgtaccacgt

SEQ ID NO: 12890 - DNA, 25 bp, Artificial Sequence
  Synthetic Oligonucleotide
tcgttgtcctgaacctactcatcgt

SEQ ID NO: 12891 - DNA, 25 bp, Artificial Sequence
  Synthetic Oligonucleotide
gtgtaacgagtgacactcgaagtgt

SEQ ID NO: 12892 - DNA, 25 bp, Artificial Sequence
  Synthetic Oligonucleotide
gtgacgtagaagagtcgctcaagtt

SEQ ID NO: 12893 - DNA, 25 bp, Artificial Sequence
  Synthetic Oligonucleotide
acctagaagcggtagtgcaacagtt

SEQ ID NO: 12894 - DNA, 25 bp, Artificial Sequence
  Synthetic Oligonucleotide
cctataggagcactcggtaagagtt

SEQ ID NO: 12895 - DNA, 25 bp, Artificial Sequence
  Synthetic Oligonucleotide
ccacaagaagacgccgttgagagtt

SEQ ID NO: 12896 - DNA, 25 bp, Artificial Sequence
  Synthetic Oligonucleotide
ccggagggacttggttcgagacgct

SEQ ID NO: 12897 - DNA, 25 bp, Artificial Sequence
  Synthetic Oligonucleotide
accaacgacccttaacttgagacct

SEQ ID NO: 12898 - DNA, 25 bp, Artificial Sequence
  Synthetic Oligonucleotide
gccaagctcccgactagtatcaact

SEQ ID NO: 12899 - DNA, 25 bp, Artificial Sequence
  Synthetic Oligonucleotide
gtccacagcggctgccttaacttct

SEQ ID NO: 12900 - DNA, 25 bp, Artificial Sequence
  Synthetic Oligonucleotide
agcagtagtcgacagccggaacttt

SEQ ID NO: 12901 - DNA, 25 bp, Artificial Sequence
  Synthetic Oligonucleotide
tcatgtgacatccacagaagtctgt

SEQ ID NO: 12902 - DNA, 25 bp, Artificial Sequence
  Synthetic Oligonucleotide
tacccaagggacaccaccgggtctt

SEQ ID NO: 12903 - DNA, 25 bp, Artificial Sequence
  Synthetic Oligonucleotide
ctcgaaaggacttccaggcagttgt

SEQ ID NO: 12904 - DNA, 25 bp, Artificial Sequence
  Synthetic Oligonucleotide
atcaaagatcaaaaggcgacgtgtg

SEQ ID NO: 12905 - DNA, 25 bp, Artificial Sequence
  Synthetic Oligonucleotide
tcaaagatcaattggcgacgtgtgt

SEQ ID NO: 12906 - DNA, 25 bp, Artificial Sequence
  Synthetic Oligonucleotide
acagaggtccattccggtctgtagt

SEQ ID NO: 12907 - DNA, 25 bp, Artificial Sequence
  Synthetic Oligonucleotide
ttgacagcggtcacttctacttttt

SEQ ID NO: 12908 - DNA, 25 bp, Artificial Sequence
  Synthetic Oligonucleotide
cacgaaaggttcctattattcgttt

SEQ ID NO: 12909 - DNA, 25 bp, Artificial Sequence
  Synthetic Oligonucleotide
ccaagaagggccattcggcgtagat

SEQ ID NO: 12910 - DNA, 25 bp, Artificial Sequence
  Synthetic Oligonucleotide
agggaaagctacgaccggacgtatt

SEQ ID NO: 12911 - DNA, 25 bp, Artificial Sequence
  Synthetic Oligonucleotide
tacgggagctgcaggaccggcttct

SEQ ID NO: 12912 - DNA, 25 bp, Artificial Sequence
  Synthetic Oligonucleotide
gcggcggctgcctgtacagcttctt

SEQ ID NO: 12913 - DNA, 25 bp, Artificial Sequence
  Synthetic Oligonucleotide
tgcggctaggaaggttcaccttgtg

SEQ ID NO: 12914 - DNA, 25 bp, Artificial Sequence
  Synthetic Oligonucleotide
gcggctaggaaccttcaccttgtgt

SEQ ID NO: 12915 - DNA, 25 bp, Artificial Sequence
  Synthetic Oligonucleotide
cgccgggtgctagctgcccttgtgt

SEQ ID NO: 12916 - DNA, 25 bp, Artificial Sequence
  Synthetic Oligonucleotide
cccgacgaggatgatgctctcctgg

SEQ ID NO: 12917 - DNA, 25 bp, Artificial Sequence
  Synthetic Oligonucleotide
cttgagtcggttgggcgtccacagg

SEQ ID NO: 12918 - DNA, 25 bp, Artificial Sequence
  Synthetic Oligonucleotide
ctcgagtctgtcacgggcacccggt

SEQ ID NO: 12919 - DNA, 25 bp, Artificial Sequence
  Synthetic Oligonucleotide
gacattctacggacgggaccccggt

SEQ ID NO: 12920 - DNA, 25 bp, Artificial Sequence
  Synthetic Oligonucleotide
gacgtttaccgtggggaccactggt

SEQ ID NO: 12921 - DNA, 25 bp, Artificial Sequence
  Synthetic Oligonucleotide
cgtcctaggtgtgctgaccccgagt

SEQ ID NO: 12922 - DNA, 25 bp, Artificial Sequence
  Synthetic Oligonucleotide
gtgtccacggtcgggtgccggttat

SEQ ID NO: 12923 - DNA, 25 bp, Artificial Sequence
  Synthetic Oligonucleotide
ggttgggacaatgtggccgttctgt

SEQ ID NO: 12924 - DNA, 25 bp, Artificial Sequence
  Synthetic Oligonucleotide
gggacgaatcgatggctctagtctg

SEQ ID NO: 12925 - DNA, 25 bp, Artificial Sequence
  Synthetic Oligonucleotide
cggacgataccatgtcgctgcggtg

SEQ ID NO: 12926 - DNA, 25 bp, Artificial Sequence
  Synthetic Oligonucleotide
cacgtcctcctagtctctgtggtgt

SEQ ID NO: 12927 - DNA, 25 bp, Artificial Sequence
  Synthetic Oligonucleotide
acagttaccacactctactgaggtg

SEQ ID NO: 12928 - DNA, 25 bp, Artificial Sequence
  Synthetic Oligonucleotide
caatagttaccagagtcttgagagg

SEQ ID NO: 12929 - DNA, 25 bp, Artificial Sequence
  Synthetic Oligonucleotide
caacagttaccagagacttgagagg

SEQ ID NO: 12930 - DNA, 25 bp, Artificial Sequence
  Synthetic Oligonucleotide
gaactactcccataaccacagtagg

SEQ ID NO: 12931 - DNA, 25 bp, Artificial Sequence
  Synthetic Oligonucleotide
agttttacaccagaagcaagacggt

SEQ ID NO: 12932 - DNA, 25 bp, Artificial Sequence
  Synthetic Oligonucleotide
attatctgagcgattaaccaaacgg

SEQ ID NO: 12933 - DNA, 25 bp, Artificial Sequence
  Synthetic Oligonucleotide
taactgtcgctttagcgcgtaaagg

SEQ ID NO: 12934 - DNA, 25 bp, Artificial Sequence
  Synthetic Oligonucleotide
gctccagtcggtgctgctgaagagg

SEQ ID NO: 12935 - DNA, 25 bp, Artificial Sequence
  Synthetic Oligonucleotide
ggtcggtggtcgtacgtactagagg

SEQ ID NO: 12936 - DNA, 25 bp, Artificial Sequence
  Synthetic Oligonucleotide
ctgtcggtacgtggtggacagagtg

SEQ ID NO: 12937 - DNA, 25 bp, Artificial Sequence
  Synthetic Oligonucleotide
ccaggtatagtactcgtagcaatgt

SEQ ID NO: 12938 - DNA, 25 bp, Artificial Sequence
  Synthetic Oligonucleotide
agatcgtcggtactcgttctcatgt

SEQ ID NO: 12939 - DNA, 25 bp, Artificial Sequence
  Synthetic Oligonucleotide
aaaatcgtaagtaacttttaccgtg

SEQ ID NO: 12940 - DNA, 25 bp, Artificial Sequence
  Synthetic Oligonucleotide
aaactgacataaaggttacagtcgt

SEQ ID NO: 12941 - DNA, 25 bp, Artificial Sequence
  Synthetic Oligonucleotide
tcgaaatacaaacatgtcgtcatgt

SEQ ID NO: 12942 - DNA, 25 bp, Artificial Sequence
  Synthetic Oligonucleotide
gctcccactacctgaaaggccagtt

SEQ ID NO: 12943 - DNA, 25 bp, Artificial Sequence
  Synthetic Oligonucleotide
gctcccactacctgaaaggccagtt

SEQ ID NO: 12944 - DNA, 25 bp, Artificial Sequence
  Synthetic Oligonucleotide
tccaccgtaccgtaggtgccgagtg

SEQ ID NO: 12945 - DNA, 25 bp, Artificial Sequence
  Synthetic Oligonucleotide
gccccggcgtaggacatggccatgt

SEQ ID NO: 12946 - DNA, 25 bp, Artificial Sequence
  Synthetic Oligonucleotide
cctcggtggctacgtgtgtctcatg

SEQ ID NO: 12947 - DNA, 25 bp, Artificial Sequence
  Synthetic Oligonucleotide
cctcggtcgcgtgatggtgcaccgg

SEQ ID NO: 12948 - DNA, 25 bp, Artificial Sequence
  Synthetic Oligonucleotide
gcttctcgaggttctgctgcgccgg

SEQ ID NO: 12949 - DNA, 25 bp, Artificial Sequence
  Synthetic Oligonucleotide
tgtctcgagtctgtgtcttgtccgg

SEQ ID NO: 12950 - DNA, 25 bp, Artificial Sequence
  Synthetic Oligonucleotide
ttgactcatacttactttcttcctt

SEQ ID NO: 12951 - DNA, 25 bp, Artificial Sequence
  Synthetic Oligonucleotide
ggtccatctatatagtcttcgttct

SEQ ID NO: 12952 - DNA, 25 bp, Artificial Sequence
  Synthetic Oligonucleotide
accttccatcagattcttcggttct

SEQ ID NO: 12953 - DNA, 25 bp, Artificial Sequence
  Synthetic Oligonucleotide
cctcccatcagtgtcttcgagagtt

SEQ ID NO: 12954 - DNA, 25 bp, Artificial Sequence
  Synthetic Oligonucleotide
gtccctactacatgacccgtcgggg

SEQ ID NO: 12955 - DNA, 25 bp, Artificial Sequence
  Synthetic Oligonucleotide
cccggtcccgactttcttcgggggt

SEQ ID NO: 12956 - DNA, 25 bp, Artificial Sequence
  Synthetic Oligonucleotide
acctgccaccagaactccgggaggt

SEQ ID NO: 12957 - DNA, 25 bp, Artificial Sequence
  Synthetic Oligonucleotide
cctgagttgctgaatcagccgaggt

SEQ ID NO: 12958 - DNA, 25 bp, Artificial Sequence
  Synthetic Oligonucleotide
tgtgtcagttgttgtctgccgaggt

SEQ ID NO: 12959 - DNA, 25 bp, Artificial Sequence
  Synthetic Oligonucleotide
cgcgtaaatgactgttgttctatgt

SEQ ID NO: 12960 - DNA, 25 bp, Artificial Sequence
  Synthetic Oligonucleotide
gcaagtccgacgttttctactgcgt

SEQ ID NO: 12961 - DNA, 25 bp, Artificial Sequence
  Synthetic Oligonucleotide
ccccagtaactagcgttgttatagg

SEQ ID NO: 12962 - DNA, 25 bp, Artificial Sequence
  Synthetic Oligonucleotide
ttcgcgctaaagaatctttaatagg

SEQ ID NO: 12963 - DNA, 25 bp, Artificial Sequence
  Synthetic Oligonucleotide
catcggttccggagttttaataggt

SEQ ID NO: 12964 - DNA, 25 bp, Artificial Sequence
  Synthetic Oligonucleotide
tcgagatcttaaaggtgtcaatagg

SEQ ID NO: 12965 - DNA, 25 bp, Artificial Sequence
  Synthetic Oligonucleotide
ttctgctccaacacggtcagaggtt

SEQ ID NO: 12966 - DNA, 25 bp, Artificial Sequence
  Synthetic Oligonucleotide
ttcaggaccaaggggttctcggtgt

SEQ ID NO: 12967 - DNA, 25 bp, Artificial Sequence
  Synthetic Oligonucleotide
gaccgtccaacgtggtcgttgcgat

SEQ ID NO: 12968 - DNA, 25 bp, Artificial Sequence
  Synthetic Oligonucleotide
taccatcgaagccccgttacggact

SEQ ID NO: 12969 - DNA, 25 bp, Artificial Sequence
  Synthetic Oligonucleotide
acgaccagctggcccctgtgcacgt

SEQ ID NO: 12970 - DNA, 25 bp, Artificial Sequence
  Synthetic Oligonucleotide
cacgccggctcgtggcttgtgaagt

SEQ ID NO: 12971 - DNA, 25 bp, Artificial Sequence
  Synthetic Oligonucleotide
acccgttactgttgcgctggggagt

SEQ ID NO: 12972 - DNA, 25 bp, Artificial Sequence
  Synthetic Oligonucleotide
ggtcctcgaatgtccggtggtgcct

SEQ ID NO: 12973 - DNA, 25 bp, Artificial Sequence
  Synthetic Oligonucleotide
tgctcgagttgttgcagggagacct

SEQ ID NO: 12974 - DNA, 25 bp, Artificial Sequence
  Synthetic Oligonucleotide
ctcgcgtaagccaagggagtacact

SEQ ID NO: 12975 - DNA, 25 bp, Artificial Sequence
  Synthetic Oligonucleotide
agggtagacccgagtaggctaccgt

SEQ ID NO: 12976 - DNA, 25 bp, Artificial Sequence
  Synthetic Oligonucleotide
atgcacgaacggaagatcggtccgt

SEQ ID NO: 12977 - DNA, 25 bp, Artificial Sequence
  Synthetic Oligonucleotide
tatgcacctacttaacatacatcct

SEQ ID NO: 12978 - DNA, 25 bp, Artificial Sequence
  Synthetic Oligonucleotide
ttcttgtcccactagaagaccccgt

SEQ ID NO: 12979 - DNA, 25 bp, Artificial Sequence
  Synthetic Oligonucleotide
ttcacttcccacgtgaggaagacct

SEQ ID NO: 12980 - DNA, 25 bp, Artificial Sequence
  Synthetic Oligonucleotide
tacaaccgcccttgagcgaggacct

SEQ ID NO: 12981 - DNA, 25 bp, Artificial Sequence
  Synthetic Oligonucleotide
agacaggcctaccgacgcagccgct

SEQ ID NO: 12982 - DNA, 25 bp, Artificial Sequence
  Synthetic Oligonucleotide
cagcagttctacgatggcaagtcct

SEQ ID NO: 12983 - DNA, 25 bp, Artificial Sequence
  Synthetic Oligonucleotide
aggacttgccatcgtagaactgctg

SEQ ID NO: 12984 - DNA, 25 bp, Artificial Sequence
  Synthetic Oligonucleotide
gagtatgtgcagcctcaacggtctg

SEQ ID NO: 12985 - DNA, 25 bp, Artificial Sequence
  Synthetic Oligonucleotide
cagaagtgcttctagacgtagggtg

SEQ ID NO: 12986 - DNA, 25 bp, Artificial Sequence
  Synthetic Oligonucleotide
agaactgcttctagacgtacggagg

SEQ ID NO: 12987 - DNA, 25 bp, Artificial Sequence
  Synthetic Oligonucleotide
agaagtgcttctagacgtacggtgg

SEQ ID NO: 12988 - DNA, 25 bp, Artificial Sequence
  Synthetic Oligonucleotide
taattggtctgtttagcgaggtggt

SEQ ID NO: 12989 - DNA, 25 bp, Artificial Sequence
  Synthetic Oligonucleotide
agaatgggtgactcggtagagtggt

SEQ ID NO: 12990 - DNA, 25 bp, Artificial Sequence
  Synthetic Oligonucleotide
aaactgggtatggctggtactatgg

SEQ ID NO: 12991 - DNA, 25 bp, Artificial Sequence
  Synthetic Oligonucleotide
aaactgggagtgactcatagttgat

SEQ ID NO: 12992 - DNA, 25 bp, Artificial Sequence
  Synthetic Oligonucleotide
caagtggtagagtcttcctatcaat

SEQ ID NO: 12993 - DNA, 25 bp, Artificial Sequence
  Synthetic Oligonucleotide
aaggcaagccctactactgttacgt

SEQ ID NO: 12994 - DNA, 25 bp, Artificial Sequence
  Synthetic Oligonucleotide
taggctcatctccttgtagtggact

SEQ ID NO: 12995 - DNA, 25 bp, Artificial Sequence
  Synthetic Oligonucleotide
ttcgactctattgcgtggactggat

SEQ ID NO: 12996 - DNA, 25 bp, Artificial Sequence
  Synthetic Oligonucleotide
tcctcctctttcatggtactgactt

SEQ ID NO: 12997 - DNA, 25 bp, Artificial Sequence
  Synthetic Oligonucleotide
catttctatgcgaagttagtagctt

SEQ ID NO: 12998 - DNA, 25 bp, Artificial Sequence
  Synthetic Oligonucleotide
cgtctgtttagtgaggtggttgatt

SEQ ID NO: 12999 - DNA, 25 bp, Artificial Sequence
  Synthetic Oligonucleotide
tagttgcgttataggtgtgttggtt

SEQ ID NO: 13000 - DNA, 25 bp, Artificial Sequence
  Synthetic Oligonucleotide
tagtaatgctaccaggatctttggt

SEQ ID NO: 13001 - DNA, 25 bp, Artificial Sequence
  Synthetic Oligonucleotide
gaagtagattcccttgactttttat

SEQ ID NO: 13002 - DNA, 25 bp, Artificial Sequence
  Synthetic Oligonucleotide
ggacgtatgttaccttgcatttgtt

SEQ ID NO: 13003 - DNA, 25 bp, Artificial Sequence
  Synthetic Oligonucleotide
gggagattcttcacctattggtcgt

SEQ ID NO: 13004 - DNA, 25 bp, Artificial Sequence
  Synthetic Oligonucleotide
cggtagaagttcgacaaagggtcgt

SEQ ID NO: 13005 - DNA, 25 bp, Artificial Sequence
  Synthetic Oligonucleotide
cctgtaggtattggaccaagaggtt

SEQ ID NO: 13006 - DNA, 25 bp, Artificial Sequence
  Synthetic Oligonucleotide
ccctagtactagaggcaaacaagtt

SEQ ID NO: 13007 - DNA, 25 bp, Artificial Sequence
  Synthetic Oligonucleotide
cgtagctgtagtagcaatagccgtt

SEQ ID NO: 13008 - DNA, 25 bp, Artificial Sequence
  Synthetic Oligonucleotide
cttctggttgttaacgttactagat

SEQ ID NO: 13009 - DNA, 25 bp, Artificial Sequence
  Synthetic Oligonucleotide
cttctggttgttaacgttactagat

SEQ ID NO: 13010 - DNA, 25 bp, Artificial Sequence
  Synthetic Oligonucleotide
cttctggttgttaacgttactagat

SEQ ID NO: 13011 - DNA, 25 bp, Artificial Sequence
  Synthetic Oligonucleotide
cttctggttgttaacgttactagat

SEQ ID NO: 13012 - DNA, 25 bp, Artificial Sequence
  Synthetic Oligonucleotide
cttctggttgttaacgttactagat

SEQ ID NO: 13013 - DNA, 25 bp, Artificial Sequence
  Synthetic Oligonucleotide
gacttcgtctttctaacgtattgat

SEQ ID NO: 13014 - DNA, 25 bp, Artificial Sequence
  Synthetic Oligonucleotide
gagtttctttgtcgacactactcct

SEQ ID NO: 13015 - DNA, 25 bp, Artificial Sequence
  Synthetic Oligonucleotide
agcgaggaccttctaccactaccct

SEQ ID NO: 13016 - DNA, 25 bp, Artificial Sequence
  Synthetic Oligonucleotide
aaaggaggttttgaacatacttcct

SEQ ID NO: 13017 - DNA, 25 bp, Artificial Sequence
  Synthetic Oligonucleotide
gtaagggtggttacaacctctattt

SEQ ID NO: 13018 - DNA, 25 bp, Artificial Sequence
  Synthetic Oligonucleotide
ttgttgtgtagtagtcatcccattt

SEQ ID NO: 13019 - DNA, 25 bp, Artificial Sequence
  Synthetic Oligonucleotide
agagtaccttcgatacccatagtgt

SEQ ID NO: 13020 - DNA, 25 bp, Artificial Sequence
  Synthetic Oligonucleotide
aacgatcggacgataccaagtcgct

SEQ ID NO: 13021 - DNA, 25 bp, Artificial Sequence
  Synthetic Oligonucleotide
cataaatcatcggtacaacaggtct

SEQ ID NO: 13022 - DNA, 25 bp, Artificial Sequence
  Synthetic Oligonucleotide
agacaagtcctgttacttcagaact

SEQ ID NO: 13023 - DNA, 25 bp, Artificial Sequence
  Synthetic Oligonucleotide
tcagaaagtcactacacctgaacct

SEQ ID NO: 13024 - DNA, 25 bp, Artificial Sequence
  Synthetic Oligonucleotide
aagacaccacctacgtagtgaccct

SEQ ID NO: 13025 - DNA, 25 bp, Artificial Sequence
  Synthetic Oligonucleotide
gaaccagatggctgctatctaccct

SEQ ID NO: 13026 - DNA, 25 bp, Artificial Sequence
  Synthetic Oligonucleotide
gagcacgattggtcgcagacctgtt

SEQ ID NO: 13027 - DNA, 25 bp, Artificial Sequence
  Synthetic Oligonucleotide
cagattgtagtgacacgagacttat

SEQ ID NO: 13028 - DNA, 25 bp, Artificial Sequence
  Synthetic Oligonucleotide
tcctagaagtacaaggcgaggcttt

SEQ ID NO: 13029 - DNA, 25 bp, Artificial Sequence
  Synthetic Oligonucleotide
ttctagaattcttggagcgctcgct

SEQ ID NO: 13030 - DNA, 25 bp, Artificial Sequence
  Synthetic Oligonucleotide
tcttaattcgcgtagagagggcgtt

SEQ ID NO: 13031 - DNA, 25 bp, Artificial Sequence
  Synthetic Oligonucleotide
cttccagttgagtaggaggtgtcat

SEQ ID NO: 13032 - DNA, 25 bp, Artificial Sequence
  Synthetic Oligonucleotide
cccacaggtgacacggacggtcctt

SEQ ID NO: 13033 - DNA, 25 bp, Artificial Sequence
  Synthetic Oligonucleotide
gtagccggcgcctaccaggtccgtt

SEQ ID NO: 13034 - DNA, 25 bp, Artificial Sequence
  Synthetic Oligonucleotide
tagccgggctccaatagatctcagt

SEQ ID NO: 13035 - DNA, 25 bp, Artificial Sequence
  Synthetic Oligonucleotide
agaccggcggccagtagcggtccat

SEQ ID NO: 13036 - DNA, 25 bp, Artificial Sequence
  Synthetic Oligonucleotide
gtcgtcgtgccccacgaggagccct

SEQ ID NO: 13037 - DNA, 25 bp, Artificial Sequence
  Synthetic Oligonucleotide
cgtgctcctcgcagcagtggccgtt

SEQ ID NO: 13038 - DNA, 25 bp, Artificial Sequence
  Synthetic Oligonucleotide
acggcagcggctcgtccagggcctt

SEQ ID NO: 13039 - DNA, 25 bp, Artificial Sequence
  Synthetic Oligonucleotide
agcggctgcgtccgtaggcctgtct

SEQ ID NO: 13040 - DNA, 25 bp, Artificial Sequence
  Synthetic Oligonucleotide
gcaggagctcgacgaacggccgttt

SEQ ID NO: 13041 - DNA, 25 bp, Artificial Sequence
  Synthetic Oligonucleotide
cgcaaccgaaggcatggtcgacttt

SEQ ID NO: 13042 - DNA, 25 bp, Artificial Sequence
  Synthetic Oligonucleotide
gacactaaggcggcgttcgacgttt

SEQ ID NO: 13043 - DNA, 25 bp, Artificial Sequence
  Synthetic Oligonucleotide
taacgttaagcggtcgttcgtgggt

SEQ ID NO: 13044 - DNA, 25 bp, Artificial Sequence
  Synthetic Oligonucleotide
atttctcaacacggacgcagagggt

SEQ ID NO: 13045 - DNA, 25 bp, Artificial Sequence
  Synthetic Oligonucleotide
tatcagttcaagctggcagaagagt

SEQ ID NO: 13046 - DNA, 25 bp, Artificial Sequence
  Synthetic Oligonucleotide
tcattaagagtcagagcaacgagat

SEQ ID NO: 13047 - DNA, 25 bp, Artificial Sequence
  Synthetic Oligonucleotide
cgactataaggccgtgtgtaagggt

SEQ ID NO: 13048 - DNA, 25 bp, Artificial Sequence
  Synthetic Oligonucleotide
tttataggtgcgttgttactgcggt

SEQ ID NO: 13049 - DNA, 25 bp, Artificial Sequence
  Synthetic Oligonucleotide
ttgttactgcggtgtttaccgcgat

SEQ ID NO: 13050 - DNA, 25 bp, Artificial Sequence
  Synthetic Oligonucleotide
tttatcgaaccgtcgttgtcctgat

SEQ ID NO: 13051 - DNA, 25 bp, Artificial Sequence
  Synthetic Oligonucleotide
ttcgtagactgagttgtccgtagtg

SEQ ID NO: 13052 - DNA, 25 bp, Artificial Sequence
  Synthetic Oligonucleotide
cttctgtaacggacttctcctctgt

SEQ ID NO: 13053 - DNA, 25 bp, Artificial Sequence
  Synthetic Oligonucleotide
acccacgcgacaactgttcctcgtg

SEQ ID NO: 13054 - DNA, 25 bp, Artificial Sequence
  Synthetic Oligonucleotide
agagcgcgccgaggctgtgcccgtg

SEQ ID NO: 13055 - DNA, 25 bp, Artificial Sequence
  Synthetic Oligonucleotide
agaacgcggccaggttcttaaagtg

SEQ ID NO: 13056 - DNA, 25 bp, Artificial Sequence
  Synthetic Oligonucleotide
acgactccctacgttcctaactagg

SEQ ID NO: 13057 - DNA, 25 bp, Artificial Sequence
  Synthetic Oligonucleotide
gtggagctcccactatcagaaaggt

SEQ ID NO: 13058 - DNA, 25 bp, Artificial Sequence
  Synthetic Oligonucleotide
gagtgctccctgtatacttaaaagt

SEQ ID NO: 13059 - DNA, 25 bp, Artificial Sequence
  Synthetic Oligonucleotide
agtacgcgctagtttcgttaaaagt

SEQ ID NO: 13060 - DNA, 25 bp, Artificial Sequence
  Synthetic Oligonucleotide
cagttctagtcgttgttcaagatgt

SEQ ID NO: 13061 - DNA, 25 bp, Artificial Sequence
  Synthetic Oligonucleotide
cagtcgcttcgtcgttcgacgaagg

SEQ ID NO: 13062 - DNA, 25 bp, Artificial Sequence
  Synthetic Oligonucleotide
tacgtcgcggggcctgactagtagg

SEQ ID NO: 13063 - DNA, 25 bp, Artificial Sequence
  Synthetic Oligonucleotide
ctatggagagaacctaactcgaagt

SEQ ID NO: 13064 - DNA, 25 bp, Artificial Sequence
  Synthetic Oligonucleotide
catagggagatcggtaagtcaccgt

SEQ ID NO: 13065 - DNA, 25 bp, Artificial Sequence
  Synthetic Oligonucleotide
ctaaaggaagacgtaggacagtcgt

SEQ ID NO: 13066 - DNA, 25 bp, Artificial Sequence
  Synthetic Oligonucleotide
cagcaatgagtacagtcgtaagcgt

SEQ ID NO: 13067 - DNA, 25 bp, Artificial Sequence
  Synthetic Oligonucleotide
agacaaaatgggacgtcgacgacgg

SEQ ID NO: 13068 - DNA, 25 bp, Artificial Sequence
  Synthetic Oligonucleotide
aaactagaactgccctagagcgagg

SEQ ID NO: 13069 - DNA, 25 bp, Artificial Sequence
  Synthetic Oligonucleotide
acctagaaccggaactgtaacagtt

SEQ ID NO: 13070 - DNA, 25 bp, Artificial Sequence
  Synthetic Oligonucleotide
accccaagaacgagcggtaccgaat

SEQ ID NO: 13071 - DNA, 25 bp, Artificial Sequence
  Synthetic Oligonucleotide
gtcgcaaagtcggagtggccgtcat

SEQ ID NO: 13072 - DNA, 25 bp, Artificial Sequence
  Synthetic Oligonucleotide
tcgtcagtcacttcagggccctcgt

SEQ ID NO: 13073 - DNA, 25 bp, Artificial Sequence
  Synthetic Oligonucleotide
ctacagcctctatggcgcgtgccgt

SEQ ID NO: 13074 - DNA, 25 bp, Artificial Sequence
  Synthetic Oligonucleotide
tactacgccgttcggttctcgcgct

SEQ ID NO: 13075 - DNA, 25 bp, Artificial Sequence
  Synthetic Oligonucleotide
ttcgaccggtcttcgtcctgcgtct

SEQ ID NO: 13076 - DNA, 25 bp, Artificial Sequence
  Synthetic Oligonucleotide
ccgcctgtcgtcctactggacgtgt

SEQ ID NO: 13077 - DNA, 25 bp, Artificial Sequence
  Synthetic Oligonucleotide
gccgctctgtcgccgactcagagtg

SEQ ID NO: 13078 - DNA, 25 bp, Artificial Sequence
  Synthetic Oligonucleotide
cggtcctccttattcatcactagtg

SEQ ID NO: 13079 - DNA, 25 bp, Artificial Sequence
  Synthetic Oligonucleotide
cggtcccagtgtgtcatacagagtt

SEQ ID NO: 13080 - DNA, 25 bp, Artificial Sequence
  Synthetic Oligonucleotide
gaccctaatgtccgcactcggtggt

SEQ ID NO: 13081 - DNA, 25 bp, Artificial Sequence
  Synthetic Oligonucleotide
ggaccctcctgctgtcccggtgtgt

SEQ ID NO: 13082 - DNA, 25 bp, Artificial Sequence
  Synthetic Oligonucleotide
ccatccttgtgccttccggtacggt

SEQ ID NO: 13083 - DNA, 25 bp, Artificial Sequence
  Synthetic Oligonucleotide
acttcctggggacctctgagacggt

SEQ ID NO: 13084 - DNA, 25 bp, Artificial Sequence
  Synthetic Oligonucleotide
tttctgtcgggatcctcgtagcagt

SEQ ID NO: 13085 - DNA, 25 bp, Artificial Sequence
  Synthetic Oligonucleotide
catgtctttgtttctgtcagtccgt

SEQ ID NO: 13086 - DNA, 25 bp, Artificial Sequence
  Synthetic Oligonucleotide
atcctttagtgtgtatctagtgact

SEQ ID NO: 13087 - DNA, 25 bp, Artificial Sequence
  Synthetic Oligonucleotide
acttctatgtttgctattgtgacgt

SEQ ID NO: 13088 - DNA, 25 bp, Artificial Sequence
  Synthetic Oligonucleotide
tcgctatgtactatttgattctggt

SEQ ID NO: 13089 - DNA, 25 bp, Artificial Sequence
  Synthetic Oligonucleotide
accatgaccgacagtttaaacaggt

SEQ ID NO: 13090 - DNA, 25 bp, Artificial Sequence
  Synthetic Oligonucleotide
aacacaacactagacgtttcaaagg

SEQ ID NO: 13091 - DNA, 25 bp, Artificial Sequence
  Synthetic Oligonucleotide
agtccggcaaagacttcacagagtg

SEQ ID NO: 13092 - DNA, 25 bp, Artificial Sequence
  Synthetic Oligonucleotide
acctaaaccaagacttccacggagt

SEQ ID NO: 13093 - DNA, 25 bp, Artificial Sequence
  Synthetic Oligonucleotide
ctcacccaacgaggtcttcatcgat

SEQ ID NO: 13094 - DNA, 25 bp, Artificial Sequence
  Synthetic Oligonucleotide
cccagcaacggtttctcactagact

SEQ ID NO: 13095 - DNA, 25 bp, Artificial Sequence
  Synthetic Oligonucleotide
gtccctgcatcagttgcgctcgact

SEQ ID NO: 13096 - DNA, 25 bp, Artificial Sequence
  Synthetic Oligonucleotide
gtccctgcatcagttgcgctcgact

SEQ ID NO: 13097 - DNA, 25 bp, Artificial Sequence
  Synthetic Oligonucleotide
gtccctgcatcagttgcgctcgact

SEQ ID NO: 13098 - DNA, 25 bp, Artificial Sequence
  Synthetic Oligonucleotide
gtccctgcatcagttgcgctcgact

SEQ ID NO: 13099 - DNA, 25 bp, Artificial Sequence
  Synthetic Oligonucleotide
gtccctgcatcagttgcgctcgact

SEQ ID NO: 13100 - DNA, 25 bp, Artificial Sequence
  Synthetic Oligonucleotide
ccgctgatgccactgcacgtcgagt

SEQ ID NO: 13101 - DNA, 25 bp, Artificial Sequence
  Synthetic Oligonucleotide
agtgttgtgctcgactgctgtcggt

SEQ ID NO: 13102 - DNA, 25 bp, Artificial Sequence
  Synthetic Oligonucleotide
tgattcttgccggtacgtggtggtg

SEQ ID NO: 13103 - DNA, 25 bp, Artificial Sequence
  Synthetic Oligonucleotide
gtatagcattcgcaagcggtggcgt

SEQ ID NO: 13104 - DNA, 25 bp, Artificial Sequence
  Synthetic Oligonucleotide
tagtagtctttctaaacaagagcgt

SEQ ID NO: 13105 - DNA, 25 bp, Artificial Sequence
  Synthetic Oligonucleotide
gtatgtcttcgcgcagctaggacgg

SEQ ID NO: 13106 - DNA, 25 bp, Artificial Sequence
  Synthetic Oligonucleotide
taatcgtacgcctgcgagcaggtgg

SEQ ID NO: 13107 - DNA, 25 bp, Artificial Sequence
  Synthetic Oligonucleotide
gagaacgagacccggagcagtgggt

SEQ ID NO: 13108 - DNA, 25 bp, Artificial Sequence
  Synthetic Oligonucleotide
aggacttgccatcgtagaactgctg

SEQ ID NO: 13109 - DNA, 25 bp, Artificial Sequence
  Synthetic Oligonucleotide
cagcagttctacgatggcaagtcct

SEQ ID NO: 13110 - DNA, 25 bp, Artificial Sequence
  Synthetic Oligonucleotide
gagtatgtgcaggctcaacggtctg

SEQ ID NO: 13111 - DNA, 25 bp, Artificial Sequence
  Synthetic Oligonucleotide
cagaagtgcttcaagacgtagggtg

SEQ ID NO: 13112 - DNA, 25 bp, Artificial Sequence
  Synthetic Oligonucleotide
agaactgcttcttgacgtacggagg

SEQ ID NO: 13113 - DNA, 25 bp, Artificial Sequence
  Synthetic Oligonucleotide
agaagtgcttcttgacgtacggtgg

SEQ ID NO: 13114 - DNA, 25 bp, Artificial Sequence
  Synthetic Oligonucleotide
taattggtctgtatagcgaggtggt

SEQ ID NO: 13115 - DNA, 25 bp, Artificial Sequence
  Synthetic Oligonucleotide
agaatgggtgacacggtagagtggt

SEQ ID NO: 13116 - DNA, 25 bp, Artificial Sequence
  Synthetic Oligonucleotide
aaactgggtatgcctggtactatgg

SEQ ID NO: 13117 - DNA, 25 bp, Artificial Sequence
  Synthetic Oligonucleotide
aaactgggagtgtctcatagttgat

SEQ ID NO: 13118 - DNA, 25 bp, Artificial Sequence
  Synthetic Oligonucleotide
caagtggtagagacttcctatcaat

SEQ ID NO: 13119 - DNA, 25 bp, Artificial Sequence
  Synthetic Oligonucleotide
aaggcaagcccttctactgttacgt

SEQ ID NO: 13120 - DNA, 25 bp, Artificial Sequence
  Synthetic Oligonucleotide
taggctcatctcgttgtagtggact

SEQ ID NO: 13121 - DNA, 25 bp, Artificial Sequence
  Synthetic Oligonucleotide
ttcgactctattccgtggactggat

SEQ ID NO: 13122 - DNA, 25 bp, Artificial Sequence
  Synthetic Oligonucleotide
tcctcctctttcttggtactgactt

SEQ ID NO: 13123 - DNA, 25 bp, Artificial Sequence
  Synthetic Oligonucleotide
catttctatgcgtagttagtagctt

SEQ ID NO: 13124 - DNA, 25 bp, Artificial Sequence
  Synthetic Oligonucleotide
cgtctgtttagtcaggtggttgatt

SEQ ID NO: 13125 - DNA, 25 bp, Artificial Sequence
  Synthetic Oligonucleotide
tagttgcgttattggtgtgttggtt

SEQ ID NO: 13126 - DNA, 25 bp, Artificial Sequence
  Synthetic Oligonucleotide
tagtaatgctacgaggatctttggt

SEQ ID NO: 13127 - DNA, 25 bp, Artificial Sequence
  Synthetic Oligonucleotide
gaagtagattccgttgactttttat

SEQ ID NO: 13128 - DNA, 25 bp, Artificial Sequence
  Synthetic Oligonucleotide
ggacgtatgttagcttgcatttgtt

SEQ ID NO: 13129 - DNA, 25 bp, Artificial Sequence
  Synthetic Oligonucleotide
gggagattcttctcctattggtcgt

SEQ ID NO: 13130 - DNA, 25 bp, Artificial Sequence
  Synthetic Oligonucleotide
cggtagaagttccacaaagggtcgt

SEQ ID NO: 13131 - DNA, 25 bp, Artificial Sequence
  Synthetic Oligonucleotide
cctgtaggtattcgaccaagaggtt

SEQ ID NO: 13132 - DNA, 25 bp, Artificial Sequence
  Synthetic Oligonucleotide
ccctagtactagtggcaaacaagtt

SEQ ID NO: 13133 - DNA, 25 bp, Artificial Sequence
  Synthetic Oligonucleotide
cgtagctgtagttgcaatagccgtt

SEQ ID NO: 13134 - DNA, 25 bp, Artificial Sequence
  Synthetic Oligonucleotide
cttctggttgtttacgttactagat

SEQ ID NO: 13135 - DNA, 25 bp, Artificial Sequence
  Synthetic Oligonucleotide
cttctggttgtttacgttactagat

SEQ ID NO: 13136 - DNA, 25 bp, Artificial Sequence
  Synthetic Oligonucleotide
cttctggttgtttacgttactagat

SEQ ID NO: 13137 - DNA, 25 bp, Artificial Sequence
  Synthetic Oligonucleotide
cttctggttgtttacgttactagat

SEQ ID NO: 13138 - DNA, 25 bp, Artificial Sequence
  Synthetic Oligonucleotide
cttctggttgtttacgttactagat

SEQ ID NO: 13139 - DNA, 25 bp, Artificial Sequence
  Synthetic Oligonucleotide
gacttcgtctttgtaacgtattgat

SEQ ID NO: 13140 - DNA, 25 bp, Artificial Sequence
  Synthetic Oligonucleotide
gagtttctttgtggacactactcct

SEQ ID NO: 13141 - DNA, 25 bp, Artificial Sequence
  Synthetic Oligonucleotide
agcgaggaccttgtaccactaccct

SEQ ID NO: 13142 - DNA, 25 bp, Artificial Sequence
  Synthetic Oligonucleotide
aaaggaggttttcaacatacttcct

SEQ ID NO: 13143 - DNA, 25 bp, Artificial Sequence
  Synthetic Oligonucleotide
gtaagggtggtttcaacctctattt

SEQ ID NO: 13144 - DNA, 25 bp, Artificial Sequence
  Synthetic Oligonucleotide
ttgttgtgtagttgtcatcccattt

SEQ ID NO: 13145 - DNA, 25 bp, Artificial Sequence
  Synthetic Oligonucleotide
agagtaccttcgttacccatagtgt

SEQ ID NO: 13146 - DNA, 25 bp, Artificial Sequence
  Synthetic Oligonucleotide
aacgatcggacgttaccaagtcgct

SEQ ID NO: 13147 - DNA, 25 bp, Artificial Sequence
  Synthetic Oligonucleotide
cataaatcatcgctacaacaggtct

SEQ ID NO: 13148 - DNA, 25 bp, Artificial Sequence
  Synthetic Oligonucleotide
agacaagtcctgatacttcagaact

SEQ ID NO: 13149 - DNA, 25 bp, Artificial Sequence
  Synthetic Oligonucleotide
tcagaaagtcacaacacctgaacct

SEQ ID NO: 13150 - DNA, 25 bp, Artificial Sequence
  Synthetic Oligonucleotide
aagacaccaccttcgtagtgaccct

SEQ ID NO: 13151 - DNA, 25 bp, Artificial Sequence
  Synthetic Oligonucleotide
gaaccagatggcagctatctaccct

SEQ ID NO: 13152 - DNA, 25 bp, Artificial Sequence
  Synthetic Oligonucleotide
gagcacgattggacgcagacctgtt

SEQ ID NO: 13153 - DNA, 25 bp, Artificial Sequence
  Synthetic Oligonucleotide
cagattgtagtgtcacgagacttat

SEQ ID NO: 13154 - DNA, 25 bp, Artificial Sequence
  Synthetic Oligonucleotide
tcctagaagtactaggcgaggcttt

SEQ ID NO: 13155 - DNA, 25 bp, Artificial Sequence
  Synthetic Oligonucleotide
ttctagaattctaggagcgctcgct

SEQ ID NO: 13156 - DNA, 25 bp, Artificial Sequence
  Synthetic Oligonucleotide
tcttaattcgcgaagagagggcgtt

SEQ ID NO: 13157 - DNA, 25 bp, Artificial Sequence
  Synthetic Oligonucleotide
cttccagttgagaaggaggtgtcat

SEQ ID NO: 13158 - DNA, 25 bp, Artificial Sequence
  Synthetic Oligonucleotide
cccacaggtgactcggacggtcctt

SEQ ID NO: 13159 - DNA, 25 bp, Artificial Sequence
  Synthetic Oligonucleotide
gtagccggcgccaaccaggtccgtt

SEQ ID NO: 13160 - DNA, 25 bp, Artificial Sequence
  Synthetic Oligonucleotide
tagccgggctcctatagatctcagt

SEQ ID NO: 13161 - DNA, 25 bp, Artificial Sequence
  Synthetic Oligonucleotide
agaccggcggcctgtagcggtccat

SEQ ID NO: 13162 - DNA, 25 bp, Artificial Sequence
  Synthetic Oligonucleotide
gtcgtcgtgcccgacgaggagccct

SEQ ID NO: 13163 - DNA, 25 bp, Artificial Sequence
  Synthetic Oligonucleotide
cgtgctcctcgctgcagtggccgtt

SEQ ID NO: 13164 - DNA, 25 bp, Artificial Sequence
  Synthetic Oligonucleotide
acggcagcggctggtccagggcctt

SEQ ID NO: 13165 - DNA, 25 bp, Artificial Sequence
  Synthetic Oligonucleotide
agcggctgcgtcggtaggcctgtct

SEQ ID NO: 13166 - DNA, 25 bp, Artificial Sequence
  Synthetic Oligonucleotide
gcaggagctcgaggaacggccgttt

SEQ ID NO: 13167 - DNA, 25 bp, Artificial Sequence
  Synthetic Oligonucleotide
cgcaaccgaagggatggtcgacttt

SEQ ID NO: 13168 - DNA, 25 bp, Artificial Sequence
  Synthetic Oligonucleotide
gacactaaggcgccgttcgacgttt

SEQ ID NO: 13169 - DNA, 25 bp, Artificial Sequence
  Synthetic Oligonucleotide
taacgttaagcgctcgttcgtgggt

SEQ ID NO: 13170 - DNA, 25 bp, Artificial Sequence
  Synthetic Oligonucleotide
atttctcaacaccgacgcagagggt

SEQ ID NO: 13171 - DNA, 25 bp, Artificial Sequence
  Synthetic Oligonucleotide
tatcagttcaaggtggcagaagagt

SEQ ID NO: 13172 - DNA, 25 bp, Artificial Sequence
  Synthetic Oligonucleotide
tcattaagagtctgagcaacgagat

SEQ ID NO: 13173 - DNA, 25 bp, Artificial Sequence
  Synthetic Oligonucleotide
cgactataaggcggtgtgtaagggt

SEQ ID NO: 13174 - DNA, 25 bp, Artificial Sequence
  Synthetic Oligonucleotide
tttataggtgcgatgttactgcggt

SEQ ID NO: 13175 - DNA, 25 bp, Artificial Sequence
  Synthetic Oligonucleotide
ttgttactgcggagtttaccgcgat

SEQ ID NO: 13176 - DNA, 25 bp, Artificial Sequence
  Synthetic Oligonucleotide
tttatcgaaccgacgttgtcctgat

SEQ ID NO: 13177 - DNA, 25 bp, Artificial Sequence
  Synthetic Oligonucleotide
ttcgtagactgacttgtccgtagtg

SEQ ID NO: 13178 - DNA, 25 bp, Artificial Sequence
  Synthetic Oligonucleotide
cttctgtaacggtcttctcctctgt

SEQ ID NO: 13179 - DNA, 25 bp, Artificial Sequence
  Synthetic Oligonucleotide
acccacgcgacatctgttcctcgtg

SEQ ID NO: 13180 - DNA, 25 bp, Artificial Sequence
  Synthetic Oligonucleotide
agagcgcgccgacgctgtgcccgtg

SEQ ID NO: 13181 - DNA, 25 bp, Artificial Sequence
  Synthetic Oligonucleotide
agaacgcggccacgttcttaaagtg

SEQ ID NO: 13182 - DNA, 25 bp, Artificial Sequence
  Synthetic Oligonucleotide
acgactccctaccttcctaactagg

SEQ ID NO: 13183 - DNA, 25 bp, Artificial Sequence
  Synthetic Oligonucleotide
gtggagctcccagtatcagaaaggt

SEQ ID NO: 13184 - DNA, 25 bp, Artificial Sequence
  Synthetic Oligonucleotide
gagtgctccctgaatacttaaaagt

SEQ ID NO: 13185 - DNA, 25 bp, Artificial Sequence
  Synthetic Oligonucleotide
agtacgcgctagattcgttaaaagt

SEQ ID NO: 13186 - DNA, 25 bp, Artificial Sequence
  Synthetic Oligonucleotide
cagttctagtcgatgttcaagatgt

SEQ ID NO: 13187 - DNA, 25 bp, Artificial Sequence
  Synthetic Oligonucleotide
cagtcgcttcgtggttcgacgaagg

SEQ ID NO: 13188 - DNA, 25 bp, Artificial Sequence
  Synthetic Oligonucleotide
tacgtcgcgggggctgactagtagg

SEQ ID NO: 13189 - DNA, 25 bp, Artificial Sequence
  Synthetic Oligonucleotide
ctatggagagaagctaactcgaagt

SEQ ID NO: 13190 - DNA, 25 bp, Artificial Sequence
  Synthetic Oligonucleotide
catagggagatccgtaagtcaccgt

SEQ ID NO: 13191 - DNA, 25 bp, Artificial Sequence
  Synthetic Oligonucleotide
ctaaaggaagacctaggacagtcgt

SEQ ID NO: 13192 - DNA, 25 bp, Artificial Sequence
  Synthetic Oligonucleotide
cagcaatgagtagagtcgtaagcgt

SEQ ID NO: 13193 - DNA, 25 bp, Artificial Sequence
  Synthetic Oligonucleotide
agacaaaatgggtcgtcgacgacgg

SEQ ID NO: 13194 - DNA, 25 bp, Artificial Sequence
  Synthetic Oligonucleotide
aaactagaactggcctagagcgagg

SEQ ID NO: 13195 - DNA, 25 bp, Artificial Sequence
  Synthetic Oligonucleotide
acctagaaccggtactgtaacagtt

SEQ ID NO: 13196 - DNA, 25 bp, Artificial Sequence
  Synthetic Oligonucleotide
accccaagaacgtgcggtaccgaat

SEQ ID NO: 13197 - DNA, 25 bp, Artificial Sequence
  Synthetic Oligonucleotide
gtcgcaaagtcgcagtggccgtcat

SEQ ID NO: 13198 - DNA, 25 bp, Artificial Sequence
  Synthetic Oligonucleotide
tcgtcagtcactacagggccctcgt

SEQ ID NO: 13199 - DNA, 25 bp, Artificial Sequence
  Synthetic Oligonucleotide
ctacagcctctaaggcgcgtgccgt

SEQ ID NO: 13200 - DNA, 25 bp, Artificial Sequence
  Synthetic Oligonucleotide
tactacgccgttgggttctcgcgct

SEQ ID NO: 13201 - DNA, 25 bp, Artificial Sequence
  Synthetic Oligonucleotide
ttcgaccggtctacgtcctgcgtct

SEQ ID NO: 13202 - DNA, 25 bp, Artificial Sequence
  Synthetic Oligonucleotide
ccgcctgtcgtcgtactggacgtgt

SEQ ID NO: 13203 - DNA, 25 bp, Artificial Sequence
  Synthetic Oligonucleotide
gccgctctgtcggcgactcagagtg

SEQ ID NO: 13204 - DNA, 25 bp, Artificial Sequence
  Synthetic Oligonucleotide
cggtcctccttaatcatcactagtg

SEQ ID NO: 13205 - DNA, 25 bp, Artificial Sequence
  Synthetic Oligonucleotide
cggtcccagtgtctcatacagagtt

SEQ ID NO: 13206 - DNA, 25 bp, Artificial Sequence
  Synthetic Oligonucleotide
gaccctaatgtcggcactcggtggt

SEQ ID NO: 13207 - DNA, 25 bp, Artificial Sequence
  Synthetic Oligonucleotide
ggaccctcctgcagtcccggtgtgt

SEQ ID NO: 13208 - DNA, 25 bp, Artificial Sequence
  Synthetic Oligonucleotide
ccatccttgtgcgttccggtacggt

SEQ ID NO: 13209 - DNA, 25 bp, Artificial Sequence
  Synthetic Oligonucleotide
acttcctggggagctctgagacggt

SEQ ID NO: 13210 - DNA, 25 bp, Artificial Sequence
  Synthetic Oligonucleotide
tttctgtcgggaacctcgtagcagt

SEQ ID NO: 13211 - DNA, 25 bp, Artificial Sequence
  Synthetic Oligonucleotide
catgtctttgttactgtcagtccgt

SEQ ID NO: 13212 - DNA, 25 bp, Artificial Sequence
  Synthetic Oligonucleotide
atcctttagtgtctatctagtgact

SEQ ID NO: 13213 - DNA, 25 bp, Artificial Sequence
  Synthetic Oligonucleotide
acttctatgtttcctattgtgacgt

SEQ ID NO: 13214 - DNA, 25 bp, Artificial Sequence
  Synthetic Oligonucleotide
tcgctatgtactttttgattctggt

SEQ ID NO: 13215 - DNA, 25 bp, Artificial Sequence
  Synthetic Oligonucleotide
accatgaccgactgtttaaacaggt

SEQ ID NO: 13216 - DNA, 25 bp, Artificial Sequence
  Synthetic Oligonucleotide
aacacaacactacacgtttcaaagg

SEQ ID NO: 13217 - DNA, 25 bp, Artificial Sequence
  Synthetic Oligonucleotide
agtccggcaaagtcttcacagagtg

SEQ ID NO: 13218 - DNA, 25 bp, Artificial Sequence
  Synthetic Oligonucleotide
acctaaaccaagtcttccacggagt

SEQ ID NO: 13219 - DNA, 25 bp, Artificial Sequence
  Synthetic Oligonucleotide
ctcacccaacgacgtcttcatcgat

SEQ ID NO: 13220 - DNA, 25 bp, Artificial Sequence
  Synthetic Oligonucleotide
cccagcaacggtatctcactagact

SEQ ID NO: 13221 - DNA, 25 bp, Artificial Sequence
  Synthetic Oligonucleotide
gtccctgcatcacttgcgctcgact

SEQ ID NO: 13222 - DNA, 25 bp, Artificial Sequence
  Synthetic Oligonucleotide
gtccctgcatcacttgcgctcgact

SEQ ID NO: 13223 - DNA, 25 bp, Artificial Sequence
  Synthetic Oligonucleotide
gtccctgcatcacttgcgctcgact

SEQ ID NO: 13224 - DNA, 25 bp, Artificial Sequence
  Synthetic Oligonucleotide
gtccctgcatcacttgcgctcgact

SEQ ID NO: 13225 - DNA, 25 bp, Artificial Sequence
  Synthetic Oligonucleotide
gtccctgcatcacttgcgctcgact

SEQ ID NO: 13226 - DNA, 25 bp, Artificial Sequence
  Synthetic Oligonucleotide
ccgctgatgccagtgcacgtcgagt

SEQ ID NO: 13227 - DNA, 25 bp, Artificial Sequence
  Synthetic Oligonucleotide
agtgttgtgctccactgctgtcggt

SEQ ID NO: 13228 - DNA, 25 bp, Artificial Sequence
  Synthetic Oligonucleotide
tgattcttgccgctacgtggtggtg

SEQ ID NO: 13229 - DNA, 25 bp, Artificial Sequence
  Synthetic Oligonucleotide
gtatagcattcggaagcggtggcgt

SEQ ID NO: 13230 - DNA, 25 bp, Artificial Sequence
  Synthetic Oligonucleotide
tagtagtctttcaaaacaagagcgt

SEQ ID NO: 13231 - DNA, 25 bp, Artificial Sequence
  Synthetic Oligonucleotide
gtatgtcttcgcccagctaggacgg

SEQ ID NO: 13232 - DNA, 25 bp, Artificial Sequence
  Synthetic Oligonucleotide
taatcgtacgccagcgagcaggtgg

SEQ ID NO: 13233 - DNA, 25 bp, Artificial Sequence
  Synthetic Oligonucleotide
gagaacgagaccgggagcagtgggt

SEQ ID NO: 13234 - DNA, 25 bp, Artificial Sequence
  Synthetic Oligonucleotide
cagcagttctacgatggcaagtcct

SEQ ID NO: 13235 - DNA, 25 bp, Artificial Sequence
  Synthetic Oligonucleotide
aggacttgccatcgtagaactgctg

SEQ ID NO: 13236 - DNA, 25 bp, Artificial Sequence
  Synthetic Oligonucleotide
gattgacgacggtcctaggtctcgt

SEQ ID NO: 13237 - DNA, 25 bp, Artificial Sequence
  Synthetic Oligonucleotide
tcgtgtaaggtcgacttacgactct

SEQ ID NO: 13238 - DNA, 25 bp, Artificial Sequence
  Synthetic Oligonucleotide
acgtgtccggtcgtaccgacggtgt

SEQ ID NO: 13239 - DNA, 25 bp, Artificial Sequence
  Synthetic Oligonucleotide
gaacgggtcctcttcgacgagtcgg

SEQ ID NO: 13240 - DNA, 25 bp, Artificial Sequence
  Synthetic Oligonucleotide
tagacggcttacacgacgagtcggt

SEQ ID NO: 13241 - DNA, 25 bp, Artificial Sequence
  Synthetic Oligonucleotide
ctagacggtccgtcggaagtcgagt

SEQ ID NO: 13242 - DNA, 25 bp, Artificial Sequence
  Synthetic Oligonucleotide
ccgaggagtccgtcggatgtcgact

SEQ ID NO: 13243 - DNA, 25 bp, Artificial Sequence
  Synthetic Oligonucleotide
tccgctggtggacctgactatgact

SEQ ID NO: 13244 - DNA, 25 bp, Artificial Sequence
  Synthetic Oligonucleotide
tctcatgacgttaaactgacataat

SEQ ID NO: 13245 - DNA, 25 bp, Artificial Sequence
  Synthetic Oligonucleotide
tctgagaaagacttataacatcagt

SEQ ID NO: 13246 - DNA, 25 bp, Artificial Sequence
  Synthetic Oligonucleotide
ccgtgaaaaatatgtgcacgacgat

SEQ ID NO: 13247 - DNA, 25 bp, Artificial Sequence
  Synthetic Oligonucleotide
ccggattacaagagtgtactgtcat

SEQ ID NO: 13248 - DNA, 25 bp, Artificial Sequence
  Synthetic Oligonucleotide
cagttcatagacgtatactagttat

SEQ ID NO: 13249 - DNA, 25 bp, Artificial Sequence
  Synthetic Oligonucleotide
ttgttacatacgattgtctattcgt

SEQ ID NO: 13250 - DNA, 25 bp, Artificial Sequence
  Synthetic Oligonucleotide
ctgaacgtatacgtgtacgttgttt

SEQ ID NO: 13251 - DNA, 25 bp, Artificial Sequence
  Synthetic Oligonucleotide
ggtgagtacttaggttagttcttct

SEQ ID NO: 13252 - DNA, 25 bp, Artificial Sequence
  Synthetic Oligonucleotide
atgaggtcataaacggtatttcttt

SEQ ID NO: 13253 - DNA, 25 bp, Artificial Sequence
  Synthetic Oligonucleotide
acataggctctatagttattgtttt

SEQ ID NO: 13254 - DNA, 25 bp, Artificial Sequence
  Synthetic Oligonucleotide
acacggctctgttgtttaattgtgt

SEQ ID NO: 13255 - DNA, 25 bp, Artificial Sequence
  Synthetic Oligonucleotide
gtacgatccggtttttaggttgtct

SEQ ID NO: 13256 - DNA, 25 bp, Artificial Sequence
  Synthetic Oligonucleotide
acgatccgttcgcgagatggtgact

SEQ ID NO: 13257 - DNA, 25 bp, Artificial Sequence
  Synthetic Oligonucleotide
gttgattcttgccggtacgtggtgg

SEQ ID NO: 13258 - DNA, 25 bp, Artificial Sequence
  Synthetic Oligonucleotide
tcgtattcttgccggaaatagtcgt

SEQ ID NO: 13259 - DNA, 25 bp, Artificial Sequence
  Synthetic Oligonucleotide
cgtagtgtctggacaataacgagtt

SEQ ID NO: 13260 - DNA, 25 bp, Artificial Sequence
  Synthetic Oligonucleotide
gacgttgtcggcatatatcgagagg

SEQ ID NO: 13261 - DNA, 25 bp, Artificial Sequence
  Synthetic Oligonucleotide
gggcagccgtacataatcgagatct

SEQ ID NO: 13262 - DNA, 25 bp, Artificial Sequence
  Synthetic Oligonucleotide
ggtgcgagccagtcctagaagtact

SEQ ID NO: 13263 - DNA, 25 bp, Artificial Sequence
  Synthetic Oligonucleotide
tagcggtacgggtaaagcgagtact

SEQ ID NO: 13264 - DNA, 25 bp, Artificial Sequence
  Synthetic Oligonucleotide
ataagcgtagcataagggtacgtct

SEQ ID NO: 13265 - DNA, 25 bp, Artificial Sequence
  Synthetic Oligonucleotide
gacttgcgatttcaactggtcgact

SEQ ID NO: 13266 - DNA, 25 bp, Artificial Sequence
  Synthetic Oligonucleotide
ggctcgcgttttaaaccgcgctact

SEQ ID NO: 13267 - DNA, 25 bp, Artificial Sequence
  Synthetic Oligonucleotide
gcgtctaccttggtctaccctttct

SEQ ID NO: 13268 - DNA, 25 bp, Artificial Sequence
  Synthetic Oligonucleotide
tggtctccgtatgtccctgttgtgt

SEQ ID NO: 13269 - DNA, 25 bp, Artificial Sequence
  Synthetic Oligonucleotide
tggctgctatctacccttctgtcgt

SEQ ID NO: 13270 - DNA, 25 bp, Artificial Sequence
  Synthetic Oligonucleotide
gtgttgatacctagccactattact

SEQ ID NO: 13271 - DNA, 25 bp, Artificial Sequence
  Synthetic Oligonucleotide
ttgttcgtcctcctgccgctattgt

SEQ ID NO: 13272 - DNA, 25 bp, Artificial Sequence
  Synthetic Oligonucleotide
tgttgtgtagtagtcatcccatttt

SEQ ID NO: 13273 - DNA, 25 bp, Artificial Sequence
  Synthetic Oligonucleotide
ggtatttaaagcacacctaatgact

SEQ ID NO: 13274 - DNA, 25 bp, Artificial Sequence
  Synthetic Oligonucleotide
gtataaaagatgaccggtcgaaact

SEQ ID NO: 13275 - DNA, 25 bp, Artificial Sequence
  Synthetic Oligonucleotide
gttaaagagaaagtcgtcaccacct

SEQ ID NO: 13276 - DNA, 25 bp, Artificial Sequence
  Synthetic Oligonucleotide
agagtaagaaactttgtagacacct

SEQ ID NO: 13277 - DNA, 25 bp, Artificial Sequence
  Synthetic Oligonucleotide
aagtagtagaaggcatattgcttat

SEQ ID NO: 13278 - DNA, 25 bp, Artificial Sequence
  Synthetic Oligonucleotide
tagcaatcatcgaatttgtcgtgat

SEQ ID NO: 13279 - DNA, 25 bp, Artificial Sequence
  Synthetic Oligonucleotide
acctaatcttgaatcacggttacat

SEQ ID NO: 13280 - DNA, 25 bp, Artificial Sequence
  Synthetic Oligonucleotide
acgctgagggacttatcaggttcat

SEQ ID NO: 13281 - DNA, 25 bp, Artificial Sequence
  Synthetic Oligonucleotide
gtgtatctggggacatcattctcct

SEQ ID NO: 13282 - DNA, 25 bp, Artificial Sequence
  Synthetic Oligonucleotide
cttctgaggtgtacggaatgtttct

SEQ ID NO: 13283 - DNA, 25 bp, Artificial Sequence
  Synthetic Oligonucleotide
cttctgaggccacctgagttgctgt

SEQ ID NO: 13284 - DNA, 25 bp, Artificial Sequence
  Synthetic Oligonucleotide
cttctgcggtcatctgaggtgctgt

SEQ ID NO: 13285 - DNA, 25 bp, Artificial Sequence
  Synthetic Oligonucleotide
cttctgtggtcatctgaggtgctgt

SEQ ID NO: 13286 - DNA, 25 bp, Artificial Sequence
  Synthetic Oligonucleotide
cgctggatgctcttgtagaggctgt

SEQ ID NO: 13287 - DNA, 25 bp, Artificial Sequence
  Synthetic Oligonucleotide
tcgctgcagtgcttgtgcaaccagt

SEQ ID NO: 13288 - DNA, 25 bp, Artificial Sequence
  Synthetic Oligonucleotide
ttgttaacggctccggcaactctat

SEQ ID NO: 13289 - DNA, 25 bp, Artificial Sequence
  Synthetic Oligonucleotide
aacaatgttttgacccgggtacctt

SEQ ID NO: 13290 - DNA, 25 bp, Artificial Sequence
  Synthetic Oligonucleotide
aatagttgtccgacgacccggaatt

SEQ ID NO: 13291 - DNA, 25 bp, Artificial Sequence
  Synthetic Oligonucleotide
aaatagcttccgtgcctagagaaat

SEQ ID NO: 13292 - DNA, 25 bp, Artificial Sequence
  Synthetic Oligonucleotide
taaagcgcgccgggtaactggccat

SEQ ID NO: 13293 - DNA, 25 bp, Artificial Sequence
  Synthetic Oligonucleotide
agaagggaaacgaaacgtggtcatt

SEQ ID NO: 13294 - DNA, 25 bp, Artificial Sequence
  Synthetic Oligonucleotide
gacaaggagaagcaactatgggtct

SEQ ID NO: 13295 - DNA, 25 bp, Artificial Sequence
  Synthetic Oligonucleotide
cgaatcgaaggctctagtctgctct

SEQ ID NO: 13296 - DNA, 25 bp, Artificial Sequence
  Synthetic Oligonucleotide
agtcgtgaggacgctatctgcgcgt

SEQ ID NO: 13297 - DNA, 25 bp, Artificial Sequence
  Synthetic Oligonucleotide
gtatcgaagaggaactacagcgcgt

SEQ ID NO: 13298 - DNA, 25 bp, Artificial Sequence
  Synthetic Oligonucleotide
cgttacactgtccgaactaaagact

SEQ ID NO: 13299 - DNA, 25 bp, Artificial Sequence
  Synthetic Oligonucleotide
tgaatctaatcccgaaaacacgagt

SEQ ID NO: 13300 - DNA, 25 bp, Artificial Sequence
  Synthetic Oligonucleotide
caacgacatcggcataagtaacagt

SEQ ID NO: 13301 - DNA, 25 bp, Artificial Sequence
  Synthetic Oligonucleotide
ctgttaactggcttaacggactagt

SEQ ID NO: 13302 - DNA, 25 bp, Artificial Sequence
  Synthetic Oligonucleotide
ggttgtgaaccacttaagacgaagt

SEQ ID NO: 13303 - DNA, 25 bp, Artificial Sequence
  Synthetic Oligonucleotide
ggttgtgaaccacttaagacgaagt

SEQ ID NO: 13304 - DNA, 25 bp, Artificial Sequence
  Synthetic Oligonucleotide
taggtgtagacgaccttccacctgt

SEQ ID NO: 13305 - DNA, 25 bp, Artificial Sequence
  Synthetic Oligonucleotide
taggtgtagacgaccttccacctgt

SEQ ID NO: 13306 - DNA, 25 bp, Artificial Sequence
  Synthetic Oligonucleotide
taggtgtaaacaaccttccatcagt

SEQ ID NO: 13307 - DNA, 25 bp, Artificial Sequence
  Synthetic Oligonucleotide
agtggtagagtcttcctatcaattt

SEQ ID NO: 13308 - DNA, 25 bp, Artificial Sequence
  Synthetic Oligonucleotide
agtatggtcctttactcgaactgtt

SEQ ID NO: 13309 - DNA, 25 bp, Artificial Sequence
  Synthetic Oligonucleotide
gaagttacgccattcccaactgact

SEQ ID NO: 13310 - DNA, 25 bp, Artificial Sequence
  Synthetic Oligonucleotide
gcacgctagccgggctccaatagat

SEQ ID NO: 13311 - DNA, 25 bp, Artificial Sequence
  Synthetic Oligonucleotide
acctaggccgcctgctagactaggt

SEQ ID NO: 13312 - DNA, 25 bp, Artificial Sequence
  Synthetic Oligonucleotide
cagtagctcccttcgaccgaagagt

SEQ ID NO: 13313 - DNA, 25 bp, Artificial Sequence
  Synthetic Oligonucleotide
agcagtggccgcttcggtcgaaagt

SEQ ID NO: 13314 - DNA, 25 bp, Artificial Sequence
  Synthetic Oligonucleotide
agagatggccggtttagctaagagt

SEQ ID NO: 13315 - DNA, 25 bp, Artificial Sequence
  Synthetic Oligonucleotide
aagaaagcggcgtctctgcagaggt

SEQ ID NO: 13316 - DNA, 25 bp, Artificial Sequence
  Synthetic Oligonucleotide
gcaagtcgagaccctactggaacgg

SEQ ID NO: 13317 - DNA, 25 bp, Artificial Sequence
  Synthetic Oligonucleotide
cgagagtagccgccactggacaggt

SEQ ID NO: 13318 - DNA, 25 bp, Artificial Sequence
  Synthetic Oligonucleotide
cgcgcggctgaggtcgtggacaagt

SEQ ID NO: 13319 - DNA, 25 bp, Artificial Sequence
  Synthetic Oligonucleotide
cgcgcgcacgccgggtcttgcagat

SEQ ID NO: 13320 - DNA, 25 bp, Artificial Sequence
  Synthetic Oligonucleotide
ctattaccccggttcttcggtagat

SEQ ID NO: 13321 - DNA, 25 bp, Artificial Sequence
  Synthetic Oligonucleotide
tttacttcaacctcctagtgagttt

SEQ ID NO: 13322 - DNA, 25 bp, Artificial Sequence
  Synthetic Oligonucleotide
tttatagacgactcgcggtaaggct

SEQ ID NO: 13323 - DNA, 25 bp, Artificial Sequence
  Synthetic Oligonucleotide
agatgagacgaccgtccaacgaggt

SEQ ID NO: 13324 - DNA, 25 bp, Artificial Sequence
  Synthetic Oligonucleotide
cgatcgagttacaaacaacgtaagt

SEQ ID NO: 13325 - DNA, 25 bp, Artificial Sequence
  Synthetic Oligonucleotide
gaccgagtcgacgaactaccacagt

SEQ ID NO: 13326 - DNA, 25 bp, Artificial Sequence
  Synthetic Oligonucleotide
cgtaaaccgatggaattctctcagt

SEQ ID NO: 13327 - DNA, 25 bp, Artificial Sequence
  Synthetic Oligonucleotide
cgttgcggctaggaacgttcacctt

SEQ ID NO: 13328 - DNA, 25 bp, Artificial Sequence
  Synthetic Oligonucleotide
ccttctcggctgtagcttcctagtt

SEQ ID NO: 13329 - DNA, 25 bp, Artificial Sequence
  Synthetic Oligonucleotide
cttccgagacttaagacagcaagtt

SEQ ID NO: 13330 - DNA, 25 bp, Artificial Sequence
  Synthetic Oligonucleotide
acgtgtccgtgttttaggagaaatt

SEQ ID NO: 13331 - DNA, 25 bp, Artificial Sequence
  Synthetic Oligonucleotide
acggtccttgacgaccaacaactct

SEQ ID NO: 13332 - DNA, 25 bp, Artificial Sequence
  Synthetic Oligonucleotide
ggtccttcagaaagtcactacacct

SEQ ID NO: 13333 - DNA, 25 bp, Artificial Sequence
  Synthetic Oligonucleotide
ctctgctagcacgtctacacgacct

SEQ ID NO: 13334 - DNA, 25 bp, Artificial Sequence
  Synthetic Oligonucleotide
ccgtcgtccagctacttagcgactt

SEQ ID NO: 13335 - DNA, 25 bp, Artificial Sequence
  Synthetic Oligonucleotide
ccctcgtccaacagacaccagactt

SEQ ID NO: 13336 - DNA, 25 bp, Artificial Sequence
  Synthetic Oligonucleotide
ctgtccacgacgtaccgacagcagt

SEQ ID NO: 13337 - DNA, 25 bp, Artificial Sequence
  Synthetic Oligonucleotide
cttcttgacgagaaccgacagagat

SEQ ID NO: 13338 - DNA, 25 bp, Artificial Sequence
  Synthetic Oligonucleotide
actttgtagtaaccgtcgcacgagg

SEQ ID NO: 13339 - DNA, 25 bp, Artificial Sequence
  Synthetic Oligonucleotide
tttgttatatacctcgacctagtgt

SEQ ID NO: 13340 - DNA, 25 bp, Artificial Sequence
  Synthetic Oligonucleotide
gcggaatttgtatttcaactcgcgt

SEQ ID NO: 13341 - DNA, 25 bp, Artificial Sequence
  Synthetic Oligonucleotide
acaactagtccgtttctgaatcggt

SEQ ID NO: 13342 - DNA, 25 bp, Artificial Sequence
  Synthetic Oligonucleotide
cgcgaacgatccgttcgcgagatgg

SEQ ID NO: 13343 - DNA, 25 bp, Artificial Sequence
  Synthetic Oligonucleotide
ccggtacatccggtactccaggtgg

SEQ ID NO: 13344 - DNA, 25 bp, Artificial Sequence
  Synthetic Oligonucleotide
cacctgtcaccagtattcagggagt

SEQ ID NO: 13345 - DNA, 25 bp, Artificial Sequence
  Synthetic Oligonucleotide
aatcgtgtcccatatatcgaagttt

SEQ ID NO: 13346 - DNA, 25 bp, Artificial Sequence
  Synthetic Oligonucleotide
agtcgacccagagaactcaacatct

SEQ ID NO: 13347 - DNA, 25 bp, Artificial Sequence
  Synthetic Oligonucleotide
actagaactcaagtaacacaaaggt

SEQ ID NO: 13348 - DNA, 25 bp, Artificial Sequence
  Synthetic Oligonucleotide
gtgacatcgacagaagtctgtgagg

SEQ ID NO: 13349 - DNA, 25 bp, Artificial Sequence
  Synthetic Oligonucleotide
gtcgacaccgcagtctagcttaagg

SEQ ID NO: 13350 - DNA, 25 bp, Artificial Sequence
  Synthetic Oligonucleotide
gtcaccgcacgtgtcgtgttgctgg

SEQ ID NO: 13351 - DNA, 25 bp, Artificial Sequence
  Synthetic Oligonucleotide
tgaacaccacttgctatctacctgg

SEQ ID NO: 13352 - DNA, 25 bp, Artificial Sequence
  Synthetic Oligonucleotide
acctgtcactccggttctacctcgg

SEQ ID NO: 13353 - DNA, 25 bp, Artificial Sequence
  Synthetic Oligonucleotide
tccttactacaatttcgaccgtcgg

SEQ ID NO: 13354 - DNA, 25 bp, Artificial Sequence
  Synthetic Oligonucleotide
acctattggtcgtttacgatcgtgg

SEQ ID NO: 13355 - DNA, 25 bp, Artificial Sequence
  Synthetic Oligonucleotide
tttcatggtactgacttacgattgg

SEQ ID NO: 13356 - DNA, 25 bp, Artificial Sequence
  Synthetic Oligonucleotide
ttctactgcgtcgagcacgattggt

SEQ ID NO: 13357 - DNA, 25 bp, Artificial Sequence
  Synthetic Oligonucleotide
tgaatctccgcaagtcagtattagg

SEQ ID NO: 13358 - DNA, 25 bp, Artificial Sequence
  Synthetic Oligonucleotide
tgaatctccgcaagtcggtattagg

SEQ ID NO: 13359 - DNA, 25 bp, Artificial Sequence
  Synthetic Oligonucleotide
ctggctcggccgagtcctatgtcgg

SEQ ID NO: 13360 - DNA, 25 bp, Artificial Sequence
  Synthetic Oligonucleotide
aggacttgccatcgtagaactgctg

SEQ ID NO: 13361 - DNA, 25 bp, Artificial Sequence
  Synthetic Oligonucleotide
cagcagttctacgatggcaagtcct

SEQ ID NO: 13362 - DNA, 25 bp, Artificial Sequence
  Synthetic Oligonucleotide
gattgacgacggacctaggtctcgt

SEQ ID NO: 13363 - DNA, 25 bp, Artificial Sequence
  Synthetic Oligonucleotide
tcgtgtaaggtccacttacgactct

SEQ ID NO: 13364 - DNA, 25 bp, Artificial Sequence
  Synthetic Oligonucleotide
acgtgtccggtcctaccgacggtgt

SEQ ID NO: 13365 - DNA, 25 bp, Artificial Sequence
  Synthetic Oligonucleotide
gaacgggtcctcatcgacgagtcgg

SEQ ID NO: 13366 - DNA, 25 bp, Artificial Sequence
  Synthetic Oligonucleotide
tagacggcttactcgacgagtcggt

SEQ ID NO: 13367 - DNA, 25 bp, Artificial Sequence
  Synthetic Oligonucleotide
ctagacggtccgacggaagtcgagt

SEQ ID NO: 13368 - DNA, 25 bp, Artificial Sequence
  Synthetic Oligonucleotide
ccgaggagtccgacggatgtcgact

SEQ ID NO: 13369 - DNA, 25 bp, Artificial Sequence
  Synthetic Oligonucleotide
tccgctggtggagctgactatgact

SEQ ID NO: 13370 - DNA, 25 bp, Artificial Sequence
  Synthetic Oligonucleotide
tctcatgacgtttaactgacataat

SEQ ID NO: 13371 - DNA, 25 bp, Artificial Sequence
  Synthetic Oligonucleotide
tctgagaaagacatataacatcagt

SEQ ID NO: 13372 - DNA, 25 bp, Artificial Sequence
  Synthetic Oligonucleotide
ccgtgaaaaataagtgcacgacgat

SEQ ID NO: 13373 - DNA, 25 bp, Artificial Sequence
  Synthetic Oligonucleotide
ccggattacaagtgtgtactgtcat

SEQ ID NO: 13374 - DNA, 25 bp, Artificial Sequence
  Synthetic Oligonucleotide
cagttcatagacctatactagttat

SEQ ID NO: 13375 - DNA, 25 bp, Artificial Sequence
  Synthetic Oligonucleotide
ttgttacatacgtttgtctattcgt

SEQ ID NO: 13376 - DNA, 25 bp, Artificial Sequence
  Synthetic Oligonucleotide
ctgaacgtatacctgtacgttgttt

SEQ ID NO: 13377 - DNA, 25 bp, Artificial Sequence
  Synthetic Oligonucleotide
ggtgagtacttacgttagttcttct

SEQ ID NO: 13378 - DNA, 25 bp, Artificial Sequence
  Synthetic Oligonucleotide
atgaggtcataatcggtatttcttt

SEQ ID NO: 13379 - DNA, 25 bp, Artificial Sequence
  Synthetic Oligonucleotide
acataggctctaaagttattgtttt

SEQ ID NO: 13380 - DNA, 25 bp, Artificial Sequence
  Synthetic Oligonucleotide
acacggctctgtagtttaattgtgt

SEQ ID NO: 13381 - DNA, 25 bp, Artificial Sequence
  Synthetic Oligonucleotide
gtacgatccggtatttaggttgtct

SEQ ID NO: 13382 - DNA, 25 bp, Artificial Sequence
  Synthetic Oligonucleotide
acgatccgttcgggagatggtgact

SEQ ID NO: 13383 - DNA, 25 bp, Artificial Sequence
  Synthetic Oligonucleotide
gttgattcttgcgggtacgtggtgg

SEQ ID NO: 13384 - DNA, 25 bp, Artificial Sequence
  Synthetic Oligonucleotide
tcgtattcttgcgggaaatagtcgt

SEQ ID NO: 13385 - DNA, 25 bp, Artificial Sequence
  Synthetic Oligonucleotide
cgtagtgtctggtcaataacgagtt

SEQ ID NO: 13386 - DNA, 25 bp, Artificial Sequence
  Synthetic Oligonucleotide
gacgttgtcggcttatatcgagagg

SEQ ID NO: 13387 - DNA, 25 bp, Artificial Sequence
  Synthetic Oligonucleotide
gggcagccgtacttaatcgagatct

SEQ ID NO: 13388 - DNA, 25 bp, Artificial Sequence
  Synthetic Oligonucleotide
ggtgcgagccagacctagaagtact

SEQ ID NO: 13389 - DNA, 25 bp, Artificial Sequence
  Synthetic Oligonucleotide
tagcggtacgggaaaagcgagtact

SEQ ID NO: 13390 - DNA, 25 bp, Artificial Sequence
  Synthetic Oligonucleotide
ataagcgtagcaaaagggtacgtct

SEQ ID NO: 13391 - DNA, 25 bp, Artificial Sequence
  Synthetic Oligonucleotide
gacttgcgatttgaactggtcgact

SEQ ID NO: 13392 - DNA, 25 bp, Artificial Sequence
  Synthetic Oligonucleotide
ggctcgcgtttttaaccgcgctact

SEQ ID NO: 13393 - DNA, 25 bp, Artificial Sequence
  Synthetic Oligonucleotide
gcgtctaccttgctctaccctttct

SEQ ID NO: 13394 - DNA, 25 bp, Artificial Sequence
  Synthetic Oligonucleotide
tggtctccgtatctccctgttgtgt

SEQ ID NO: 13395 - DNA, 25 bp, Artificial Sequence
  Synthetic Oligonucleotide
tggctgctatcttcccttctgtcgt

SEQ ID NO: 13396 - DNA, 25 bp, Artificial Sequence
  Synthetic Oligonucleotide
gtgttgataccttgccactattact

SEQ ID NO: 13397 - DNA, 25 bp, Artificial Sequence
  Synthetic Oligonucleotide
ttgttcgtcctcgtgccgctattgt

SEQ ID NO: 13398 - DNA, 25 bp, Artificial Sequence
  Synthetic Oligonucleotide
tgttgtgtagtactcatcccatttt

SEQ ID NO: 13399 - DNA, 25 bp, Artificial Sequence
  Synthetic Oligonucleotide
ggtatttaaagctcacctaatgact

SEQ ID NO: 13400 - DNA, 25 bp, Artificial Sequence
  Synthetic Oligonucleotide
gtataaaagatgtccggtcgaaact

SEQ ID NO: 13401 - DNA, 25 bp, Artificial Sequence
  Synthetic Oligonucleotide
gttaaagagaaactcgtcaccacct

SEQ ID NO: 13402 - DNA, 25 bp, Artificial Sequence
  Synthetic Oligonucleotide
agagtaagaaacattgtagacacct

SEQ ID NO: 13403 - DNA, 25 bp, Artificial Sequence
  Synthetic Oligonucleotide
aagtagtagaagccatattgcttat

SEQ ID NO: 13404 - DNA, 25 bp, Artificial Sequence
  Synthetic Oligonucleotide
tagcaatcatcgtatttgtcgtgat

SEQ ID NO: 13405 - DNA, 25 bp, Artificial Sequence
  Synthetic Oligonucleotide
acctaatcttgattcacggttacat

SEQ ID NO: 13406 - DNA, 25 bp, Artificial Sequence
  Synthetic Oligonucleotide
acgctgagggacatatcaggttcat

SEQ ID NO: 13407 - DNA, 25 bp, Artificial Sequence
  Synthetic Oligonucleotide
gtgtatctggggtcatcattctcct

SEQ ID NO: 13408 - DNA, 25 bp, Artificial Sequence
  Synthetic Oligonucleotide
cttctgaggtgttcggaatgtttct

SEQ ID NO: 13409 - DNA, 25 bp, Artificial Sequence
  Synthetic Oligonucleotide
cttctgaggccagctgagttgctgt

SEQ ID NO: 13410 - DNA, 25 bp, Artificial Sequence
  Synthetic Oligonucleotide
cttctgcggtcaactgaggtgctgt

SEQ ID NO: 13411 - DNA, 25 bp, Artificial Sequence
  Synthetic Oligonucleotide
cttctgtggtcaactgaggtgctgt

SEQ ID NO: 13412 - DNA, 25 bp, Artificial Sequence
  Synthetic Oligonucleotide
cgctggatgctcatgtagaggctgt

SEQ ID NO: 13413 - DNA, 25 bp, Artificial Sequence
  Synthetic Oligonucleotide
tcgctgcagtgcatgtgcaaccagt

SEQ ID NO: 13414 - DNA, 25 bp, Artificial Sequence
  Synthetic Oligonucleotide
ttgttaacggctgcggcaactctat

SEQ ID NO: 13415 - DNA, 25 bp, Artificial Sequence
  Synthetic Oligonucleotide
aacaatgttttgtcccgggtacctt

SEQ ID NO: 13416 - DNA, 25 bp, Artificial Sequence
  Synthetic Oligonucleotide
aatagttgtccgtcgacccggaatt

SEQ ID NO: 13417 - DNA, 25 bp, Artificial Sequence
  Synthetic Oligonucleotide
aaatagcttccgagcctagagaaat

SEQ ID NO: 13418 - DNA, 25 bp, Artificial Sequence
  Synthetic Oligonucleotide
taaagcgcgccgcgtaactggccat

SEQ ID NO: 13419 - DNA, 25 bp, Artificial Sequence
  Synthetic Oligonucleotide
agaagggaaacgtaacgtggtcatt

SEQ ID NO: 13420 - DNA, 25 bp, Artificial Sequence
  Synthetic Oligonucleotide
gacaaggagaaggaactatgggtct

SEQ ID NO: 13421 - DNA, 25 bp, Artificial Sequence
  Synthetic Oligonucleotide
cgaatcgaaggcactagtctgctct

SEQ ID NO: 13422 - DNA, 25 bp, Artificial Sequence
  Synthetic Oligonucleotide
agtcgtgaggaccctatctgcgcgt

SEQ ID NO: 13423 - DNA, 25 bp, Artificial Sequence
  Synthetic Oligonucleotide
gtatcgaagaggtactacagcgcgt

SEQ ID NO: 13424 - DNA, 25 bp, Artificial Sequence
  Synthetic Oligonucleotide
cgttacactgtcggaactaaagact

SEQ ID NO: 13425 - DNA, 25 bp, Artificial Sequence
  Synthetic Oligonucleotide
tgaatctaatccggaaaacacgagt

SEQ ID NO: 13426 - DNA, 25 bp, Artificial Sequence
  Synthetic Oligonucleotide
caacgacatcgggataagtaacagt

SEQ ID NO: 13427 - DNA, 25 bp, Artificial Sequence
  Synthetic Oligonucleotide
ctgttaactggcataacggactagt

SEQ ID NO: 13428 - DNA, 25 bp, Artificial Sequence
  Synthetic Oligonucleotide
ggttgtgaaccagttaagacgaagt

SEQ ID NO: 13429 - DNA, 25 bp, Artificial Sequence
  Synthetic Oligonucleotide
ggttgtgaaccagttaagacgaagt

SEQ ID NO: 13430 - DNA, 25 bp, Artificial Sequence
  Synthetic Oligonucleotide
taggtgtagacgtccttccacctgt

SEQ ID NO: 13431 - DNA, 25 bp, Artificial Sequence
  Synthetic Oligonucleotide
taggtgtagacgtccttccacctgt

SEQ ID NO: 13432 - DNA, 25 bp, Artificial Sequence
  Synthetic Oligonucleotide
taggtgtaaacatccttccatcagt

SEQ ID NO: 13433 - DNA, 25 bp, Artificial Sequence
  Synthetic Oligonucleotide
agtggtagagtcatcctatcaattt

SEQ ID NO: 13434 - DNA, 25 bp, Artificial Sequence
  Synthetic Oligonucleotide
agtatggtccttaactcgaactgtt

SEQ ID NO: 13435 - DNA, 25 bp, Artificial Sequence
  Synthetic Oligonucleotide
gaagttacgccaatcccaactgact

SEQ ID NO: 13436 - DNA, 25 bp, Artificial Sequence
  Synthetic Oligonucleotide
gcacgctagccgcgctccaatagat

SEQ ID NO: 13437 - DNA, 25 bp, Artificial Sequence
  Synthetic Oligonucleotide
acctaggccgccagctagactaggt

SEQ ID NO: 13438 - DNA, 25 bp, Artificial Sequence
  Synthetic Oligonucleotide
cagtagctccctacgaccgaagagt

SEQ ID NO: 13439 - DNA, 25 bp, Artificial Sequence
  Synthetic Oligonucleotide
agcagtggccgcatcggtcgaaagt

SEQ ID NO: 13440 - DNA, 25 bp, Artificial Sequence
  Synthetic Oligonucleotide
agagatggccggattagctaagagt

SEQ ID NO: 13441 - DNA, 25 bp, Artificial Sequence
  Synthetic Oligonucleotide
aagaaagcggcgactctgcagaggt

SEQ ID NO: 13442 - DNA, 25 bp, Artificial Sequence
  Synthetic Oligonucleotide
gcaagtcgagacgctactggaacgg

SEQ ID NO: 13443 - DNA, 25 bp, Artificial Sequence
  Synthetic Oligonucleotide
cgagagtagccggcactggacaggt

SEQ ID NO: 13444 - DNA, 25 bp, Artificial Sequence
  Synthetic Oligonucleotide
cgcgcggctgagctcgtggacaagt

SEQ ID NO: 13445 - DNA, 25 bp, Artificial Sequence
  Synthetic Oligonucleotide
cgcgcgcacgcccggtcttgcagat

SEQ ID NO: 13446 - DNA, 25 bp, Artificial Sequence
  Synthetic Oligonucleotide
ctattaccccggatcttcggtagat

SEQ ID NO: 13447 - DNA, 25 bp, Artificial Sequence
  Synthetic Oligonucleotide
tttacttcaaccacctagtgagttt

SEQ ID NO: 13448 - DNA, 25 bp, Artificial Sequence
  Synthetic Oligonucleotide
tttatagacgacacgcggtaaggct

SEQ ID NO: 13449 - DNA, 25 bp, Artificial Sequence
  Synthetic Oligonucleotide
agatgagacgacggtccaacgaggt

SEQ ID NO: 13450 - DNA, 25 bp, Artificial Sequence
  Synthetic Oligonucleotide
cgatcgagttactaacaacgtaagt

SEQ ID NO: 13451 - DNA, 25 bp, Artificial Sequence
  Synthetic Oligonucleotide
gaccgagtcgaccaactaccacagt

SEQ ID NO: 13452 - DNA, 25 bp, Artificial Sequence
  Synthetic Oligonucleotide
cgtaaaccgatgcaattctctcagt

SEQ ID NO: 13453 - DNA, 25 bp, Artificial Sequence
  Synthetic Oligonucleotide
cgttgcggctagcaacgttcacctt

SEQ ID NO: 13454 - DNA, 25 bp, Artificial Sequence
  Synthetic Oligonucleotide
ccttctcggctgaagcttcctagtt

SEQ ID NO: 13455 - DNA, 25 bp, Artificial Sequence
  Synthetic Oligonucleotide
cttccgagactttagacagcaagtt

SEQ ID NO: 13456 - DNA, 25 bp, Artificial Sequence
  Synthetic Oligonucleotide
acgtgtccgtgtattaggagaaatt

SEQ ID NO: 13457 - DNA, 25 bp, Artificial Sequence
  Synthetic Oligonucleotide
acggtccttgaccaccaacaactct

SEQ ID NO: 13458 - DNA, 25 bp, Artificial Sequence
  Synthetic Oligonucleotide
ggtccttcagaatgtcactacacct

SEQ ID NO: 13459 - DNA, 25 bp, Artificial Sequence
  Synthetic Oligonucleotide
ctctgctagcacctctacacgacct

SEQ ID NO: 13460 - DNA, 25 bp, Artificial Sequence
  Synthetic Oligonucleotide
ccgtcgtccagcaacttagcgactt

SEQ ID NO: 13461 - DNA, 25 bp, Artificial Sequence
  Synthetic Oligonucleotide
ccctcgtccaactgacaccagactt

SEQ ID NO: 13462 - DNA, 25 bp, Artificial Sequence
  Synthetic Oligonucleotide
ctgtccacgacgaaccgacagcagt

SEQ ID NO: 13463 - DNA, 25 bp, Artificial Sequence
  Synthetic Oligonucleotide
cttcttgacgagtaccgacagagat

SEQ ID NO: 13464 - DNA, 25 bp, Artificial Sequence
  Synthetic Oligonucleotide
actttgtagtaagcgtcgcacgagg

SEQ ID NO: 13465 - DNA, 25 bp, Artificial Sequence
  Synthetic Oligonucleotide
tttgttatatacgtcgacctagtgt

SEQ ID NO: 13466 - DNA, 25 bp, Artificial Sequence
  Synthetic Oligonucleotide
gcggaatttgtaattcaactcgcgt

SEQ ID NO: 13467 - DNA, 25 bp, Artificial Sequence
  Synthetic Oligonucleotide
acaactagtccgattctgaatcggt

SEQ ID NO: 13468 - DNA, 25 bp, Artificial Sequence
  Synthetic Oligonucleotide
cgcgaacgatcccttcgcgagatgg

SEQ ID NO: 13469 - DNA, 25 bp, Artificial Sequence
  Synthetic Oligonucleotide
ccggtacatccgctactccaggtgg

SEQ ID NO: 13470 - DNA, 25 bp, Artificial Sequence
  Synthetic Oligonucleotide
cacctgtcaccactattcagggagt

SEQ ID NO: 13471 - DNA, 25 bp, Artificial Sequence
  Synthetic Oligonucleotide
aatcgtgtcccaaatatcgaagttt

SEQ ID NO: 13472 - DNA, 25 bp, Artificial Sequence
  Synthetic Oligonucleotide
agtcgacccagacaactcaacatct

SEQ ID NO: 13473 - DNA, 25 bp, Artificial Sequence
  Synthetic Oligonucleotide
actagaactcaactaacacaaaggt

SEQ ID NO: 13474 - DNA, 25 bp, Artificial Sequence
  Synthetic Oligonucleotide
gtgacatcgacacaagtctgtgagg

SEQ ID NO: 13475 - DNA, 25 bp, Artificial Sequence
  Synthetic Oligonucleotide
gtcgacaccgcactctagcttaagg

SEQ ID NO: 13476 - DNA, 25 bp, Artificial Sequence
  Synthetic Oligonucleotide
gtcaccgcacgtctcgtgttgctgg

SEQ ID NO: 13477 - DNA, 25 bp, Artificial Sequence
  Synthetic Oligonucleotide
tgaacaccacttcctatctacctgg

SEQ ID NO: 13478 - DNA, 25 bp, Artificial Sequence
  Synthetic Oligonucleotide
acctgtcactcccgttctacctcgg

SEQ ID NO: 13479 - DNA, 25 bp, Artificial Sequence
  Synthetic Oligonucleotide
tccttactacaaattcgaccgtcgg

SEQ ID NO: 13480 - DNA, 25 bp, Artificial Sequence
  Synthetic Oligonucleotide
acctattggtcgattacgatcgtgg

SEQ ID NO: 13481 - DNA, 25 bp, Artificial Sequence
  Synthetic Oligonucleotide
tttcatggtactcacttacgattgg

SEQ ID NO: 13482 - DNA, 25 bp, Artificial Sequence
  Synthetic Oligonucleotide
ttctactgcgtccagcacgattggt

SEQ ID NO: 13483 - DNA, 25 bp, Artificial Sequence
  Synthetic Oligonucleotide
tgaatctccgcatgtcagtattagg

SEQ ID NO: 13484 - DNA, 25 bp, Artificial Sequence
  Synthetic Oligonucleotide
tgaatctccgcatgtcggtattagg

SEQ ID NO: 13485 - DNA, 25 bp, Artificial Sequence
  Synthetic Oligonucleotide
ctggctcggccgtgtcctatgtcgg

SEQ ID NO: 13486 - DNA, 25 bp, Artificial Sequence
  Synthetic Oligonucleotide
cagcagttctacgatggcaagtcct

SEQ ID NO: 13487 - DNA, 25 bp, Artificial Sequence
  Synthetic Oligonucleotide
aggacttgccatcgtagaactgctg

SEQ ID NO: 13488 - DNA, 25 bp, Artificial Sequence
  Synthetic Oligonucleotide
gcatgactcgtcctaatggtaccgt

SEQ ID NO: 13489 - DNA, 25 bp, Artificial Sequence
  Synthetic Oligonucleotide
acgtaactgggaagttacgtaccgt

SEQ ID NO: 13490 - DNA, 25 bp, Artificial Sequence
  Synthetic Oligonucleotide
gtacgtcctggtgacacgcgaccct

SEQ ID NO: 13491 - DNA, 25 bp, Artificial Sequence
  Synthetic Oligonucleotide
tcgaagtacttgtctcccggaccct

SEQ ID NO: 13492 - DNA, 25 bp, Artificial Sequence
  Synthetic Oligonucleotide
tcaagcgggacgacccggtcgtcct

SEQ ID NO: 13493 - DNA, 25 bp, Artificial Sequence
  Synthetic Oligonucleotide
tacagaaccggcacaccttcgtctt

SEQ ID NO: 13494 - DNA, 25 bp, Artificial Sequence
  Synthetic Oligonucleotide
taagacaccggacgaacccgttcat

SEQ ID NO: 13495 - DNA, 25 bp, Artificial Sequence
  Synthetic Oligonucleotide
aaactatgggaaaagtcgttcacgt

SEQ ID NO: 13496 - DNA, 25 bp, Artificial Sequence
  Synthetic Oligonucleotide
tcatagacgaaaaggacgtctaagt

SEQ ID NO: 13497 - DNA, 25 bp, Artificial Sequence
  Synthetic Oligonucleotide
ctgaaactagaaaaggtctactagt

SEQ ID NO: 13498 - DNA, 25 bp, Artificial Sequence
  Synthetic Oligonucleotide
tgaccacagatgatatgtcgtctgt

SEQ ID NO: 13499 - DNA, 25 bp, Artificial Sequence
  Synthetic Oligonucleotide
cacccgacacactgttaggtcttgt

SEQ ID NO: 13500 - DNA, 25 bp, Artificial Sequence
  Synthetic Oligonucleotide
gcgtacacttacttggcgtacgtgt

SEQ ID NO: 13501 - DNA, 25 bp, Artificial Sequence
  Synthetic Oligonucleotide
tgctcgactgctgtcggtacgtcgt

SEQ ID NO: 13502 - DNA, 25 bp, Artificial Sequence
  Synthetic Oligonucleotide
gtgctgtatgagtcgtggtcgtagt

SEQ ID NO: 13503 - DNA, 25 bp, Artificial Sequence
  Synthetic Oligonucleotide
ctgagttgtccgtagtgtagtctat

SEQ ID NO: 13504 - DNA, 25 bp, Artificial Sequence
  Synthetic Oligonucleotide
gacgttgtttaccaagacttactat

SEQ ID NO: 13505 - DNA, 25 bp, Artificial Sequence
  Synthetic Oligonucleotide
cgcgtttgtataaagtcgacttaat

SEQ ID NO: 13506 - DNA, 25 bp, Artificial Sequence
  Synthetic Oligonucleotide
tcggtatcggttttgtagccgtcat

SEQ ID NO: 13507 - DNA, 25 bp, Artificial Sequence
  Synthetic Oligonucleotide
cggtcacgaggattggtgactcggt

SEQ ID NO: 13508 - DNA, 25 bp, Artificial Sequence
  Synthetic Oligonucleotide
cggtcatctgaggtgctgtatgagt

SEQ ID NO: 13509 - DNA, 25 bp, Artificial Sequence
  Synthetic Oligonucleotide
ccggtgttccacgagcgggtgtagt

SEQ ID NO: 13510 - DNA, 25 bp, Artificial Sequence
  Synthetic Oligonucleotide
ccccgtgcttccgagtagtaagttt

SEQ ID NO: 13511 - DNA, 25 bp, Artificial Sequence
  Synthetic Oligonucleotide
cgtcttgtctccagaataaagtaat

SEQ ID NO: 13512 - DNA, 25 bp, Artificial Sequence
  Synthetic Oligonucleotide
cagttttgtcgttccataattgaat

SEQ ID NO: 13513 - DNA, 25 bp, Artificial Sequence
  Synthetic Oligonucleotide
aagtcaacgaactccaaattgaagt

SEQ ID NO: 13514 - DNA, 25 bp, Artificial Sequence
  Synthetic Oligonucleotide
agtcaacgaactccaaattgaagtt

SEQ ID NO: 13515 - DNA, 25 bp, Artificial Sequence
  Synthetic Oligonucleotide
acgaaagcgtcatcaatcagaagtt

SEQ ID NO: 13516 - DNA, 25 bp, Artificial Sequence
  Synthetic Oligonucleotide
acagaaggaacagttacagaactgt

SEQ ID NO: 13517 - DNA, 25 bp, Artificial Sequence
  Synthetic Oligonucleotide
gcggaggcgaacattagcagagatt

SEQ ID NO: 13518 - DNA, 25 bp, Artificial Sequence
  Synthetic Oligonucleotide
cgactagctaaaatcgcaacgacct

SEQ ID NO: 13519 - DNA, 25 bp, Artificial Sequence
  Synthetic Oligonucleotide
gtacagatataaggtcggtctccct

SEQ ID NO: 13520 - DNA, 25 bp, Artificial Sequence
  Synthetic Oligonucleotide
ggctagaattagaacgggtaccgct

SEQ ID NO: 13521 - DNA, 25 bp, Artificial Sequence
  Synthetic Oligonucleotide
ggctagaattagaacgggtaccgct

SEQ ID NO: 13522 - DNA, 25 bp, Artificial Sequence
  Synthetic Oligonucleotide
cggggaatcacgacgtcgattgcgt

SEQ ID NO: 13523 - DNA, 25 bp, Artificial Sequence
  Synthetic Oligonucleotide
aaagtggagatcgccgcgttatgct

SEQ ID NO: 13524 - DNA, 25 bp, Artificial Sequence
  Synthetic Oligonucleotide
taagactgaatctccgcaagtcggt

SEQ ID NO: 13525 - DNA, 25 bp, Artificial Sequence
  Synthetic Oligonucleotide
tagtatatgcatttctccacatggt

SEQ ID NO: 13526 - DNA, 25 bp, Artificial Sequence
  Synthetic Oligonucleotide
gtagacaagacatttcccacgaatt

SEQ ID NO: 13527 - DNA, 25 bp, Artificial Sequence
  Synthetic Oligonucleotide
gtttctagcaagactctaacgattt

SEQ ID NO: 13528 - DNA, 25 bp, Artificial Sequence
  Synthetic Oligonucleotide
ctagctaaaatcgcaacgacctcgt

SEQ ID NO: 13529 - DNA, 25 bp, Artificial Sequence
  Synthetic Oligonucleotide
tagtcaacaatcagatcttcatcgt

SEQ ID NO: 13530 - DNA, 25 bp, Artificial Sequence
  Synthetic Oligonucleotide
agtcaaacaggcaatacttctagct

SEQ ID NO: 13531 - DNA, 25 bp, Artificial Sequence
  Synthetic Oligonucleotide
cctaaaaagttaacttcttctaact

SEQ ID NO: 13532 - DNA, 25 bp, Artificial Sequence
  Synthetic Oligonucleotide
tccacggaaacgtctttgtttcagt

SEQ ID NO: 13533 - DNA, 25 bp, Artificial Sequence
  Synthetic Oligonucleotide
actccgtggaagtcttggtttaggt

SEQ ID NO: 13534 - DNA, 25 bp, Artificial Sequence
  Synthetic Oligonucleotide
ctcttgttgagatcgttggtttgct

SEQ ID NO: 13535 - DNA, 25 bp, Artificial Sequence
  Synthetic Oligonucleotide
ccgaaaaggtaacgttggtttgtct

SEQ ID NO: 13536 - DNA, 25 bp, Artificial Sequence
  Synthetic Oligonucleotide
cgccataatttgtatatggttccct

SEQ ID NO: 13537 - DNA, 25 bp, Artificial Sequence
  Synthetic Oligonucleotide
cagaacttgaggactggagtccact

SEQ ID NO: 13538 - DNA, 25 bp, Artificial Sequence
  Synthetic Oligonucleotide
gaccactaaggcgtgtcgagcccgt

SEQ ID NO: 13539 - DNA, 25 bp, Artificial Sequence
  Synthetic Oligonucleotide
catgcccaagtagtctgcaaccact

SEQ ID NO: 13540 - DNA, 25 bp, Artificial Sequence
  Synthetic Oligonucleotide
tcgttgtacaagccgcggcaaaact

SEQ ID NO: 13541 - DNA, 25 bp, Artificial Sequence
  Synthetic Oligonucleotide
ctacggtaaaagtccggcaaagact

SEQ ID NO: 13542 - DNA, 25 bp, Artificial Sequence
  Synthetic Oligonucleotide
tggtatcgcgagtacaggcataaat

SEQ ID NO: 13543 - DNA, 25 bp, Artificial Sequence
  Synthetic Oligonucleotide
tacggcacgagctaccccatgaact

SEQ ID NO: 13544 - DNA, 25 bp, Artificial Sequence
  Synthetic Oligonucleotide
tgcaccagaccgtcgcaaaggcgct

SEQ ID NO: 13545 - DNA, 25 bp, Artificial Sequence
  Synthetic Oligonucleotide
cgaacgggaacgtcgaaagggacat

SEQ ID NO: 13546 - DNA, 25 bp, Artificial Sequence
  Synthetic Oligonucleotide
aacgcgcggacgacggaaggaacct

SEQ ID NO: 13547 - DNA, 25 bp, Artificial Sequence
  Synthetic Oligonucleotide
acccggtgcacgtagggaaacctct

SEQ ID NO: 13548 - DNA, 25 bp, Artificial Sequence
  Synthetic Oligonucleotide
tgcgctattcagctggcggacccct

SEQ ID NO: 13549 - DNA, 25 bp, Artificial Sequence
  Synthetic Oligonucleotide
ttattcagagacgactagaccacct

SEQ ID NO: 13550 - DNA, 25 bp, Artificial Sequence
  Synthetic Oligonucleotide
ttattcagagacgactagaccacct

SEQ ID NO: 13551 - DNA, 25 bp, Artificial Sequence
  Synthetic Oligonucleotide
tttacgtcaggtgagacgaaaactt

SEQ ID NO: 13552 - DNA, 25 bp, Artificial Sequence
  Synthetic Oligonucleotide
acaatgatagcgtagacgaaacaat

SEQ ID NO: 13553 - DNA, 25 bp, Artificial Sequence
  Synthetic Oligonucleotide
tcagttctatggagagaacctaact

SEQ ID NO: 13554 - DNA, 25 bp, Artificial Sequence
  Synthetic Oligonucleotide
gtagcatgaggacgaacgactaggt

SEQ ID NO: 13555 - DNA, 25 bp, Artificial Sequence
  Synthetic Oligonucleotide
aggttatcagtacaagcaagacatt

SEQ ID NO: 13556 - DNA, 25 bp, Artificial Sequence
  Synthetic Oligonucleotide
atgtttagtaggtgcataactatct

SEQ ID NO: 13557 - DNA, 25 bp, Artificial Sequence
  Synthetic Oligonucleotide
aaattattgaggtttctacaattct

SEQ ID NO: 13558 - DNA, 25 bp, Artificial Sequence
  Synthetic Oligonucleotide
tgaaagctagctaggccttgatttt

SEQ ID NO: 13559 - DNA, 25 bp, Artificial Sequence
  Synthetic Oligonucleotide
agactaagatggcctttatagtatt

SEQ ID NO: 13560 - DNA, 25 bp, Artificial Sequence
  Synthetic Oligonucleotide
ctggaatagtggtagcttaagtatt

SEQ ID NO: 13561 - DNA, 25 bp, Artificial Sequence
  Synthetic Oligonucleotide
aaacagcgagaagcgttacagttgt

SEQ ID NO: 13562 - DNA, 25 bp, Artificial Sequence
  Synthetic Oligonucleotide
cacgaaagtcgggacgtctttattt

SEQ ID NO: 13563 - DNA, 25 bp, Artificial Sequence
  Synthetic Oligonucleotide
cttgagcaagccacgcactctattt

SEQ ID NO: 13564 - DNA, 25 bp, Artificial Sequence
  Synthetic Oligonucleotide
ccggagggtttcacgaccctaatgt

SEQ ID NO: 13565 - DNA, 25 bp, Artificial Sequence
  Synthetic Oligonucleotide
tcggagggctcatcgaccctaatgt

SEQ ID NO: 13566 - DNA, 25 bp, Artificial Sequence
  Synthetic Oligonucleotide
acgggatggctctagcgccgcaagt

SEQ ID NO: 13567 - DNA, 25 bp, Artificial Sequence
  Synthetic Oligonucleotide
agcagcggccgcttcggccgaaagt

SEQ ID NO: 13568 - DNA, 25 bp, Artificial Sequence
  Synthetic Oligonucleotide
gtcccgtagccttggcgagcaacgg

SEQ ID NO: 13569 - DNA, 25 bp, Artificial Sequence
  Synthetic Oligonucleotide
tgtgcacgtccgcggccgattcagg

SEQ ID NO: 13570 - DNA, 25 bp, Artificial Sequence
  Synthetic Oligonucleotide
tgccgctctgtcgccgattcacagt

SEQ ID NO: 13571 - DNA, 25 bp, Artificial Sequence
  Synthetic Oligonucleotide
cggtctacttcagtcactccgacat

SEQ ID NO: 13572 - DNA, 25 bp, Artificial Sequence
  Synthetic Oligonucleotide
agtagtttctcaggcttctgtaact

SEQ ID NO: 13573 - DNA, 25 bp, Artificial Sequence
  Synthetic Oligonucleotide
attgtttcgtctacgctatcattgt

SEQ ID NO: 13574 - DNA, 25 bp, Artificial Sequence
  Synthetic Oligonucleotide
ctgtttatcgacttcccttacccgt

SEQ ID NO: 13575 - DNA, 25 bp, Artificial Sequence
  Synthetic Oligonucleotide
tttcttcgaagttcttgacgaccgt

SEQ ID NO: 13576 - DNA, 25 bp, Artificial Sequence
  Synthetic Oligonucleotide
cgcgggaagtacttctacgcaccgt

SEQ ID NO: 13577 - DNA, 25 bp, Artificial Sequence
  Synthetic Oligonucleotide
cacgtgcggtgacctttacgcgctt

SEQ ID NO: 13578 - DNA, 25 bp, Artificial Sequence
  Synthetic Oligonucleotide
cgacgcagtagaaatcgtcggactt

SEQ ID NO: 13579 - DNA, 25 bp, Artificial Sequence
  Synthetic Oligonucleotide
gaagtacgacgatcctcgttctcgt

SEQ ID NO: 13580 - DNA, 25 bp, Artificial Sequence
  Synthetic Oligonucleotide
gtgcacgtagggaaacctcttctgt

SEQ ID NO: 13581 - DNA, 25 bp, Artificial Sequence
  Synthetic Oligonucleotide
ttctacgggatcaacaattctacgt

SEQ ID NO: 13582 - DNA, 25 bp, Artificial Sequence
  Synthetic Oligonucleotide
taccggtgactcgatagtatccact

SEQ ID NO: 13583 - DNA, 25 bp, Artificial Sequence
  Synthetic Oligonucleotide
ccgtagtgtctggacaataacgagt

SEQ ID NO: 13584 - DNA, 25 bp, Artificial Sequence
  Synthetic Oligonucleotide
taccgtattcggtcgaactgacgct

SEQ ID NO: 13585 - DNA, 25 bp, Artificial Sequence
  Synthetic Oligonucleotide
ctctctttcgtggcggacctaccgt

SEQ ID NO: 13586 - DNA, 25 bp, Artificial Sequence
  Synthetic Oligonucleotide
aaccttgttatggactacaccgcct

SEQ ID NO: 13587 - DNA, 25 bp, Artificial Sequence
  Synthetic Oligonucleotide
tgccttacggtaaggccactcgaat

SEQ ID NO: 13588 - DNA, 25 bp, Artificial Sequence
  Synthetic Oligonucleotide
ccgttcgcgagatggtgactcgatt

SEQ ID NO: 13589 - DNA, 25 bp, Artificial Sequence
  Synthetic Oligonucleotide
ggtcacggacgtttgtcaagagtat

SEQ ID NO: 13590 - DNA, 25 bp, Artificial Sequence
  Synthetic Oligonucleotide
catcggtgtagatgtcaagtgtcgt

SEQ ID NO: 13591 - DNA, 25 bp, Artificial Sequence
  Synthetic Oligonucleotide
cctcgtgttcacagtcacactgtgt

SEQ ID NO: 13592 - DNA, 25 bp, Artificial Sequence
  Synthetic Oligonucleotide
ggcccttgtcactgtctcttgtcgt

SEQ ID NO: 13593 - DNA, 25 bp, Artificial Sequence
  Synthetic Oligonucleotide
cgcacgactcgtcacctctttgtgt

SEQ ID NO: 13594 - DNA, 25 bp, Artificial Sequence
  Synthetic Oligonucleotide
ccggggaccttagttatgtagtagt

SEQ ID NO: 13595 - DNA, 25 bp, Artificial Sequence
  Synthetic Oligonucleotide
ccgctcgccttaccttatgtgtagt

SEQ ID NO: 13596 - DNA, 25 bp, Artificial Sequence
  Synthetic Oligonucleotide
tcccgtcgcctttgcgagtcgtggt

SEQ ID NO: 13597 - DNA, 25 bp, Artificial Sequence
  Synthetic Oligonucleotide
tctgaggtgctgtatgagtcgtggt

SEQ ID NO: 13598 - DNA, 25 bp, Artificial Sequence
  Synthetic Oligonucleotide
tgctcgactgctgttggtacgtggt

SEQ ID NO: 13599 - DNA, 25 bp, Artificial Sequence
  Synthetic Oligonucleotide
cacgaccctaatgtccgcactcggt

SEQ ID NO: 13600 - DNA, 25 bp, Artificial Sequence
  Synthetic Oligonucleotide
cccgacctataggagccgcagtcgg

SEQ ID NO: 13601 - DNA, 25 bp, Artificial Sequence
  Synthetic Oligonucleotide
tcacgaccctaatgtccgcactcgg

SEQ ID NO: 13602 - DNA, 25 bp, Artificial Sequence
  Synthetic Oligonucleotide
tcgacaccaccacttcgacatcggt

SEQ ID NO: 13603 - DNA, 25 bp, Artificial Sequence
  Synthetic Oligonucleotide
ggcgaaccaccgagctccagtcggt

SEQ ID NO: 13604 - DNA, 25 bp, Artificial Sequence
  Synthetic Oligonucleotide
tataacagccacggccagtcgtcgt

SEQ ID NO: 13605 - DNA, 25 bp, Artificial Sequence
  Synthetic Oligonucleotide
tatcactactgaaccggcagtccgt

SEQ ID NO: 13606 - DNA, 25 bp, Artificial Sequence
  Synthetic Oligonucleotide
cgtcactaccgtacctgacaccagt

SEQ ID NO: 13607 - DNA, 25 bp, Artificial Sequence
  Synthetic Oligonucleotide
tgctagagcgcgagccgacaccagt

SEQ ID NO: 13608 - DNA, 25 bp, Artificial Sequence
  Synthetic Oligonucleotide
ttcgagctgcacagccgacatccgt

SEQ ID NO: 13609 - DNA, 25 bp, Artificial Sequence
  Synthetic Oligonucleotide
cggacgcttccacacgacactccgt

SEQ ID NO: 13610 - DNA, 25 bp, Artificial Sequence
  Synthetic Oligonucleotide
gttacccgcgttcggactacgtcgg

SEQ ID NO: 13611 - DNA, 25 bp, Artificial Sequence
  Synthetic Oligonucleotide
gtctccccggagccactcgtcgtgt

SEQ ID NO: 13612 - DNA, 25 bp, Artificial Sequence
  Synthetic Oligonucleotide
aggacttgccatcgtagaactgctg

SEQ ID NO: 13613 - DNA, 25 bp, Artificial Sequence
  Synthetic Oligonucleotide
cagcagttctacgatggcaagtcct

SEQ ID NO: 13614 - DNA, 25 bp, Artificial Sequence
  Synthetic Oligonucleotide
gcatgactcgtcgtaatggtaccgt

SEQ ID NO: 13615 - DNA, 25 bp, Artificial Sequence
  Synthetic Oligonucleotide
acgtaactgggatgttacgtaccgt

SEQ ID NO: 13616 - DNA, 25 bp, Artificial Sequence
  Synthetic Oligonucleotide
gtacgtcctggtcacacgcgaccct

SEQ ID NO: 13617 - DNA, 25 bp, Artificial Sequence
  Synthetic Oligonucleotide
tcgaagtacttgactcccggaccct

SEQ ID NO: 13618 - DNA, 25 bp, Artificial Sequence
  Synthetic Oligonucleotide
tcaagcgggacgtcccggtcgtcct

SEQ ID NO: 13619 - DNA, 25 bp, Artificial Sequence
  Synthetic Oligonucleotide
tacagaaccggctcaccttcgtctt

SEQ ID NO: 13620 - DNA, 25 bp, Artificial Sequence
  Synthetic Oligonucleotide
taagacaccggaggaacccgttcat

SEQ ID NO: 13621 - DNA, 25 bp, Artificial Sequence
  Synthetic Oligonucleotide
aaactatgggaatagtcgttcacgt

SEQ ID NO: 13622 - DNA, 25 bp, Artificial Sequence
  Synthetic Oligonucleotide
tcatagacgaaatggacgtctaagt

SEQ ID NO: 13623 - DNA, 25 bp, Artificial Sequence
  Synthetic Oligonucleotide
ctgaaactagaataggtctactagt

SEQ ID NO: 13624 - DNA, 25 bp, Artificial Sequence
  Synthetic Oligonucleotide
tgaccacagatgttatgtcgtctgt

SEQ ID NO: 13625 - DNA, 25 bp, Artificial Sequence
  Synthetic Oligonucleotide
cacccgacacacagttaggtcttgt

SEQ ID NO: 13626 - DNA, 25 bp, Artificial Sequence
  Synthetic Oligonucleotide
gcgtacacttacatggcgtacgtgt

SEQ ID NO: 13627 - DNA, 25 bp, Artificial Sequence
  Synthetic Oligonucleotide
tgctcgactgctctcggtacgtcgt

SEQ ID NO: 13628 - DNA, 25 bp, Artificial Sequence
  Synthetic Oligonucleotide
gtgctgtatgagacgtggtcgtagt

SEQ ID NO: 13629 - DNA, 25 bp, Artificial Sequence
  Synthetic Oligonucleotide
ctgagttgtccgaagtgtagtctat

SEQ ID NO: 13630 - DNA, 25 bp, Artificial Sequence
  Synthetic Oligonucleotide
gacgttgtttacgaagacttactat

SEQ ID NO: 13631 - DNA, 25 bp, Artificial Sequence
  Synthetic Oligonucleotide
cgcgtttgtatatagtcgacttaat

SEQ ID NO: 13632 - DNA, 25 bp, Artificial Sequence
  Synthetic Oligonucleotide
tcggtatcggttatgtagccgtcat

SEQ ID NO: 13633 - DNA, 25 bp, Artificial Sequence
  Synthetic Oligonucleotide
cggtcacgaggaatggtgactcggt

SEQ ID NO: 13634 - DNA, 25 bp, Artificial Sequence
  Synthetic Oligonucleotide
cggtcatctgagctgctgtatgagt

SEQ ID NO: 13635 - DNA, 25 bp, Artificial Sequence
  Synthetic Oligonucleotide
ccggtgttccaccagcgggtgtagt

SEQ ID NO: 13636 - DNA, 25 bp, Artificial Sequence
  Synthetic Oligonucleotide
ccccgtgcttcccagtagtaagttt

SEQ ID NO: 13637 - DNA, 25 bp, Artificial Sequence
  Synthetic Oligonucleotide
cgtcttgtctcctgaataaagtaat

SEQ ID NO: 13638 - DNA, 25 bp, Artificial Sequence
  Synthetic Oligonucleotide
cagttttgtcgtaccataattgaat

SEQ ID NO: 13639 - DNA, 25 bp, Artificial Sequence
  Synthetic Oligonucleotide
aagtcaacgaacaccaaattgaagt

SEQ ID NO: 13640 - DNA, 25 bp, Artificial Sequence
  Synthetic Oligonucleotide
agtcaacgaactgcaaattgaagtt

SEQ ID NO: 13641 - DNA, 25 bp, Artificial Sequence
  Synthetic Oligonucleotide
acgaaagcgtcaacaatcagaagtt

SEQ ID NO: 13642 - DNA, 25 bp, Artificial Sequence
  Synthetic Oligonucleotide
acagaaggaacacttacagaactgt

SEQ ID NO: 13643 - DNA, 25 bp, Artificial Sequence
  Synthetic Oligonucleotide
gcggaggcgaactttagcagagatt

SEQ ID NO: 13644 - DNA, 25 bp, Artificial Sequence
  Synthetic Oligonucleotide
cgactagctaaattcgcaacgacct

SEQ ID NO: 13645 - DNA, 25 bp, Artificial Sequence
  Synthetic Oligonucleotide
gtacagatataacgtcggtctccct

SEQ ID NO: 13646 - DNA, 25 bp, Artificial Sequence
  Synthetic Oligonucleotide
ggctagaattagtacgggtaccgct

SEQ ID NO: 13647 - DNA, 25 bp, Artificial Sequence
  Synthetic Oligonucleotide
ggctagaattagtacgggtaccgct

SEQ ID NO: 13648 - DNA, 25 bp, Artificial Sequence
  Synthetic Oligonucleotide
cggggaatcacgtcgtcgattgcgt

SEQ ID NO: 13649 - DNA, 25 bp, Artificial Sequence
  Synthetic Oligonucleotide
aaagtggagatccccgcgttatgct

SEQ ID NO: 13650 - DNA, 25 bp, Artificial Sequence
  Synthetic Oligonucleotide
taagactgaatcaccgcaagtcggt

SEQ ID NO: 13651 - DNA, 25 bp, Artificial Sequence
  Synthetic Oligonucleotide
tagtatatgcatatctccacatggt

SEQ ID NO: 13652 - DNA, 25 bp, Artificial Sequence
  Synthetic Oligonucleotide
gtagacaagacaattcccacgaatt

SEQ ID NO: 13653 - DNA, 25 bp, Artificial Sequence
  Synthetic Oligonucleotide
gtttctagcaagtctctaacgattt

SEQ ID NO: 13654 - DNA, 25 bp, Artificial Sequence
  Synthetic Oligonucleotide
ctagctaaaatcccaacgacctcgt

SEQ ID NO: 13655 - DNA, 25 bp, Artificial Sequence
  Synthetic Oligonucleotide
tagtcaacaatctgatcttcatcgt

SEQ ID NO: 13656 - DNA, 25 bp, Artificial Sequence
  Synthetic Oligonucleotide
agtcaaacaggctatacttctagct

SEQ ID NO: 13657 - DNA, 25 bp, Artificial Sequence
  Synthetic Oligonucleotide
cctaaaaagttatcttcttctaact

SEQ ID NO: 13658 - DNA, 25 bp, Artificial Sequence
  Synthetic Oligonucleotide
tccacggaaacgactttgtttcagt

SEQ ID NO: 13659 - DNA, 25 bp, Artificial Sequence
  Synthetic Oligonucleotide
actccgtggaagacttggtttaggt

SEQ ID NO: 13660 - DNA, 25 bp, Artificial Sequence
  Synthetic Oligonucleotide
ctcttgttgagaacgttggtttgct

SEQ ID NO: 13661 - DNA, 25 bp, Artificial Sequence
  Synthetic Oligonucleotide
ccgaaaaggtaaggttggtttgtct

SEQ ID NO: 13662 - DNA, 25 bp, Artificial Sequence
  Synthetic Oligonucleotide
cgccataatttgaatatggttccct

SEQ ID NO: 13663 - DNA, 25 bp, Artificial Sequence
  Synthetic Oligonucleotide
cagaacttgaggtctggagtccact

SEQ ID NO: 13664 - DNA, 25 bp, Artificial Sequence
  Synthetic Oligonucleotide
gaccactaaggcctgtcgagcccgt

SEQ ID NO: 13665 - DNA, 25 bp, Artificial Sequence
  Synthetic Oligonucleotide
catgcccaagtactctgcaaccact

SEQ ID NO: 13666 - DNA, 25 bp, Artificial Sequence
  Synthetic Oligonucleotide
tcgttgtacaaggcgcggcaaaact

SEQ ID NO: 13667 - DNA, 25 bp, Artificial Sequence
  Synthetic Oligonucleotide
ctacggtaaaagaccggcaaagact

SEQ ID NO: 13668 - DNA, 25 bp, Artificial Sequence
  Synthetic Oligonucleotide
tggtatcgcgagaacaggcataaat

SEQ ID NO: 13669 - DNA, 25 bp, Artificial Sequence
  Synthetic Oligonucleotide
tacggcacgagcaaccccatgaact

SEQ ID NO: 13670 - DNA, 25 bp, Artificial Sequence
  Synthetic Oligonucleotide
tgcaccagaccgacgcaaaggcgct

SEQ ID NO: 13671 - DNA, 25 bp, Artificial Sequence
  Synthetic Oligonucleotide
cgaacgggaacgacgaaagggacat

SEQ ID NO: 13672 - DNA, 25 bp, Artificial Sequence
  Synthetic Oligonucleotide
aacgcgcggacgtcggaaggaacct

SEQ ID NO: 13673 - DNA, 25 bp, Artificial Sequence
  Synthetic Oligonucleotide
acccggtgcacgaagggaaacctct

SEQ ID NO: 13674 - DNA, 25 bp, Artificial Sequence
  Synthetic Oligonucleotide
tgcgctattcaggtggcggacccct

SEQ ID NO: 13675 - DNA, 25 bp, Artificial Sequence
  Synthetic Oligonucleotide
ttattcagagaccactagaccacct

SEQ ID NO: 13676 - DNA, 25 bp, Artificial Sequence
  Synthetic Oligonucleotide
ttattcagagaccactagaccacct

SEQ ID NO: 13677 - DNA, 25 bp, Artificial Sequence
  Synthetic Oligonucleotide
tttacgtcaggtcagacgaaaactt

SEQ ID NO: 13678 - DNA, 25 bp, Artificial Sequence
  Synthetic Oligonucleotide
acaatgatagcgaagacgaaacaat

SEQ ID NO: 13679 - DNA, 25 bp, Artificial Sequence
  Synthetic Oligonucleotide
tcagttctatggtgagaacctaact

SEQ ID NO: 13680 - DNA, 25 bp, Artificial Sequence
  Synthetic Oligonucleotide
gtagcatgaggaggaacgactaggt

SEQ ID NO: 13681 - DNA, 25 bp, Artificial Sequence
  Synthetic Oligonucleotide
aggttatcagtagaagcaagacatt

SEQ ID NO: 13682 - DNA, 25 bp, Artificial Sequence
  Synthetic Oligonucleotide
atgtttagtaggagcataactatct

SEQ ID NO: 13683 - DNA, 25 bp, Artificial Sequence
  Synthetic Oligonucleotide
aaattattgaggattctacaattct

SEQ ID NO: 13684 - DNA, 25 bp, Artificial Sequence
  Synthetic Oligonucleotide
tgaaagctagcttggccttgatttt

SEQ ID NO: 13685 - DNA, 25 bp, Artificial Sequence
  Synthetic Oligonucleotide
agactaagatgggctttatagtatt

SEQ ID NO: 13686 - DNA, 25 bp, Artificial Sequence
  Synthetic Oligonucleotide
ctggaatagtggaagcttaagtatt

SEQ ID NO: 13687 - DNA, 25 bp, Artificial Sequence
  Synthetic Oligonucleotide
aaacagcgagaaccgttacagttgt

SEQ ID NO: 13688 - DNA, 25 bp, Artificial Sequence
  Synthetic Oligonucleotide
cacgaaagtcggcacgtctttattt

SEQ ID NO: 13689 - DNA, 25 bp, Artificial Sequence
  Synthetic Oligonucleotide
cttgagcaagcctcgcactctattt

SEQ ID NO: 13690 - DNA, 25 bp, Artificial Sequence
  Synthetic Oligonucleotide
ccggagggtttctcgaccctaatgt

SEQ ID NO: 13691 - DNA, 25 bp, Artificial Sequence
  Synthetic Oligonucleotide
tcggagggctcaacgaccctaatgt

SEQ ID NO: 13692 - DNA, 25 bp, Artificial Sequence
  Synthetic Oligonucleotide
acgggatggctcaagcgccgcaagt

SEQ ID NO: 13693 - DNA, 25 bp, Artificial Sequence
  Synthetic Oligonucleotide
agcagcggccgcatcggccgaaagt

SEQ ID NO: 13694 - DNA, 25 bp, Artificial Sequence
  Synthetic Oligonucleotide
gtcccgtagcctaggcgagcaacgg

SEQ ID NO: 13695 - DNA, 25 bp, Artificial Sequence
  Synthetic Oligonucleotide
tgtgcacgtccggggccgattcagg

SEQ ID NO: 13696 - DNA, 25 bp, Artificial Sequence
  Synthetic Oligonucleotide
tgccgctctgtccccgattcacagt

SEQ ID NO: 13697 - DNA, 25 bp, Artificial Sequence
  Synthetic Oligonucleotide
cggtctacttcactcactccgacat

SEQ ID NO: 13698 - DNA, 25 bp, Artificial Sequence
  Synthetic Oligonucleotide
agtagtttctcacgcttctgtaact

SEQ ID NO: 13699 - DNA, 25 bp, Artificial Sequence
  Synthetic Oligonucleotide
attgtttcgtcttcgctatcattgt

SEQ ID NO: 13700 - DNA, 25 bp, Artificial Sequence
  Synthetic Oligonucleotide
ctgtttatcgacatcccttacccgt

SEQ ID NO: 13701 - DNA, 25 bp, Artificial Sequence
  Synthetic Oligonucleotide
tttcttcgaagtacttgacgaccgt

SEQ ID NO: 13702 - DNA, 25 bp, Artificial Sequence
  Synthetic Oligonucleotide
cgcgggaagtacatctacgcaccgt

SEQ ID NO: 13703 - DNA, 25 bp, Artificial Sequence
  Synthetic Oligonucleotide
cacgtgcggtgagctttacgcgctt

SEQ ID NO: 13704 - DNA, 25 bp, Artificial Sequence
  Synthetic Oligonucleotide
cgacgcagtagatatcgtcggactt

SEQ ID NO: 13705 - DNA, 25 bp, Artificial Sequence
  Synthetic Oligonucleotide
gaagtacgacgaacctcgttctcgt

SEQ ID NO: 13706 - DNA, 25 bp, Artificial Sequence
  Synthetic Oligonucleotide
gtgcacgtagggtaacctcttctgt

SEQ ID NO: 13707 - DNA, 25 bp, Artificial Sequence
  Synthetic Oligonucleotide
ttctacgggatctacaattctacgt

SEQ ID NO: 13708 - DNA, 25 bp, Artificial Sequence
  Synthetic Oligonucleotide
taccggtgactccatagtatccact

SEQ ID NO: 13709 - DNA, 25 bp, Artificial Sequence
  Synthetic Oligonucleotide
ccgtagtgtctgcacaataacgagt

SEQ ID NO: 13710 - DNA, 25 bp, Artificial Sequence
  Synthetic Oligonucleotide
taccgtattcggacgaactgacgct

SEQ ID NO: 13711 - DNA, 25 bp, Artificial Sequence
  Synthetic Oligonucleotide
ctctctttcgtgccggacctaccgt

SEQ ID NO: 13712 - DNA, 25 bp, Artificial Sequence
  Synthetic Oligonucleotide
aaccttgttatgcactacaccgcct

SEQ ID NO: 13713 - DNA, 25 bp, Artificial Sequence
  Synthetic Oligonucleotide
tgccttacggtatggccactcgaat

SEQ ID NO: 13714 - DNA, 25 bp, Artificial Sequence
  Synthetic Oligonucleotide
ccgttcgcgagaaggtgactcgatt

SEQ ID NO: 13715 - DNA, 25 bp, Artificial Sequence
  Synthetic Oligonucleotide
ggtcacggacgtatgtcaagagtat

SEQ ID NO: 13716 - DNA, 25 bp, Artificial Sequence
  Synthetic Oligonucleotide
catcggtgtagaagtcaagtgtcgt

SEQ ID NO: 13717 - DNA, 25 bp, Artificial Sequence
  Synthetic Oligonucleotide
cctcgtgttcactgtcacactgtgt

SEQ ID NO: 13718 - DNA, 25 bp, Artificial Sequence
  Synthetic Oligonucleotide
ggcccttgtcacagtctcttgtcgt

SEQ ID NO: 13719 - DNA, 25 bp, Artificial Sequence
  Synthetic Oligonucleotide
cgcacgactcgtgacctctttgtgt

SEQ ID NO: 13720 - DNA, 25 bp, Artificial Sequence
  Synthetic Oligonucleotide
ccggggaccttacttatgtagtagt

SEQ ID NO: 13721 - DNA, 25 bp, Artificial Sequence
  Synthetic Oligonucleotide
ccgctcgccttagcttatgtgtagt

SEQ ID NO: 13722 - DNA, 25 bp, Artificial Sequence
  Synthetic Oligonucleotide
tcccgtcgccttagcgagtcgtggt

SEQ ID NO: 13723 - DNA, 25 bp, Artificial Sequence
  Synthetic Oligonucleotide
tctgaggtgctgaatgagtcgtggt

SEQ ID NO: 13724 - DNA, 25 bp, Artificial Sequence
  Synthetic Oligonucleotide
tgctcgactgctcttggtacgtggt

SEQ ID NO: 13725 - DNA, 25 bp, Artificial Sequence
  Synthetic Oligonucleotide
cacgaccctaatctccgcactcggt

SEQ ID NO: 13726 - DNA, 25 bp, Artificial Sequence
  Synthetic Oligonucleotide
cccgacctatagcagccgcagtcgg

SEQ ID NO: 13727 - DNA, 25 bp, Artificial Sequence
  Synthetic Oligonucleotide
tcacgaccctaaagtccgcactcgg

SEQ ID NO: 13728 - DNA, 25 bp, Artificial Sequence
  Synthetic Oligonucleotide
tcgacaccaccagttcgacatcggt

SEQ ID NO: 13729 - DNA, 25 bp, Artificial Sequence
  Synthetic Oligonucleotide
ggcgaaccaccgtgctccagtcggt

SEQ ID NO: 13730 - DNA, 25 bp, Artificial Sequence
  Synthetic Oligonucleotide
tataacagccaccgccagtcgtcgt

SEQ ID NO: 13731 - DNA, 25 bp, Artificial Sequence
  Synthetic Oligonucleotide
tatcactactgatccggcagtccgt

SEQ ID NO: 13732 - DNA, 25 bp, Artificial Sequence
  Synthetic Oligonucleotide
cgtcactaccgttcctgacaccagt

SEQ ID NO: 13733 - DNA, 25 bp, Artificial Sequence
  Synthetic Oligonucleotide
tgctagagcgcgtgccgacaccagt

SEQ ID NO: 13734 - DNA, 25 bp, Artificial Sequence
  Synthetic Oligonucleotide
ttcgagctgcactgccgacatccgt

SEQ ID NO: 13735 - DNA, 25 bp, Artificial Sequence
  Synthetic Oligonucleotide
cggacgcttccagacgacactccgt

SEQ ID NO: 13736 - DNA, 25 bp, Artificial Sequence
  Synthetic Oligonucleotide
gttacccgcgttgggactacgtcgg

SEQ ID NO: 13737 - DNA, 25 bp, Artificial Sequence
  Synthetic Oligonucleotide
gtctccccggaggcactcgtcgtgt

SEQ ID NO: 13738 - DNA, 25 bp, Artificial Sequence
  Synthetic Oligonucleotide
cagcagttctacgatggcaagtcct

SEQ ID NO: 13739 - DNA, 25 bp, Artificial Sequence
  Synthetic Oligonucleotide
aggacttgccatcgtagaactgctg

SEQ ID NO: 13740 - DNA, 25 bp, Artificial Sequence
  Synthetic Oligonucleotide
tcctagtcgcggaccgtgagcgctt

SEQ ID NO: 13741 - DNA, 25 bp, Artificial Sequence
  Synthetic Oligonucleotide
tcccccaggttcagtgatcgacagt

SEQ ID NO: 13742 - DNA, 25 bp, Artificial Sequence
  Synthetic Oligonucleotide
acctaccggtgtatgtaccgtccgt

SEQ ID NO: 13743 - DNA, 25 bp, Artificial Sequence
  Synthetic Oligonucleotide
attatgcgtactactgtcgtcgttt

SEQ ID NO: 13744 - DNA, 25 bp, Artificial Sequence
  Synthetic Oligonucleotide
cgtagtcgtcttcctcgtctctact

SEQ ID NO: 13745 - DNA, 25 bp, Artificial Sequence
  Synthetic Oligonucleotide
ggctaggtactgatgccgctctagt

SEQ ID NO: 13746 - DNA, 25 bp, Artificial Sequence
  Synthetic Oligonucleotide
aactctaggtcggagtgctccctgt

SEQ ID NO: 13747 - DNA, 25 bp, Artificial Sequence
  Synthetic Oligonucleotide
cctaggtaccgctagtccgtctcgt

SEQ ID NO: 13748 - DNA, 25 bp, Artificial Sequence
  Synthetic Oligonucleotide
cgctcgtgccggtcgtcgtcgttct

SEQ ID NO: 13749 - DNA, 25 bp, Artificial Sequence
  Synthetic Oligonucleotide
cggaccgacccgacgagtgtcgtct

SEQ ID NO: 13750 - DNA, 25 bp, Artificial Sequence
  Synthetic Oligonucleotide
ccctcaacgacaacttcagtgtcct

SEQ ID NO: 13751 - DNA, 25 bp, Artificial Sequence
  Synthetic Oligonucleotide
gccttaccagaccacttacctttct

SEQ ID NO: 13752 - DNA, 25 bp, Artificial Sequence
  Synthetic Oligonucleotide
gacaattctagactttccgttctgt

SEQ ID NO: 13753 - DNA, 25 bp, Artificial Sequence
  Synthetic Oligonucleotide
caattctagactttccgttctgtgt

SEQ ID NO: 13754 - DNA, 25 bp, Artificial Sequence
  Synthetic Oligonucleotide
aagtctcagacttgcagtcttctgt

SEQ ID NO: 13755 - DNA, 25 bp, Artificial Sequence
  Synthetic Oligonucleotide
acttcagacacttaaatcgtcgttt

SEQ ID NO: 13756 - DNA, 25 bp, Artificial Sequence
  Synthetic Oligonucleotide
actggaagtaccttctacctcggtt

SEQ ID NO: 13757 - DNA, 25 bp, Artificial Sequence
  Synthetic Oligonucleotide
acctgcggtcagacgtacctcggct

SEQ ID NO: 13758 - DNA, 25 bp, Artificial Sequence
  Synthetic Oligonucleotide
tccttcagtctctacgtcctctgct

SEQ ID NO: 13759 - DNA, 25 bp, Artificial Sequence
  Synthetic Oligonucleotide
tctgtcagtccgttgctgtctgtgt

SEQ ID NO: 13760 - DNA, 25 bp, Artificial Sequence
  Synthetic Oligonucleotide
ctttcgactcgatccgactgttcct

SEQ ID NO: 13761 - DNA, 25 bp, Artificial Sequence
  Synthetic Oligonucleotide
catctgtcagtacagacgaggtcct

SEQ ID NO: 13762 - DNA, 25 bp, Artificial Sequence
  Synthetic Oligonucleotide
cccagtgtgtcatacagagttttgt

SEQ ID NO: 13763 - DNA, 25 bp, Artificial Sequence
  Synthetic Oligonucleotide
ccgcatgttcaggaatgcctatagt

SEQ ID NO: 13764 - DNA, 25 bp, Artificial Sequence
  Synthetic Oligonucleotide
ccgtatctccagaaatgcctacagt

SEQ ID NO: 13765 - DNA, 25 bp, Artificial Sequence
  Synthetic Oligonucleotide
ctgacccacgagaagaccccgttgt

SEQ ID NO: 13766 - DNA, 25 bp, Artificial Sequence
  Synthetic Oligonucleotide
gtacgtccacggaaacgtctttgtt

SEQ ID NO: 13767 - DNA, 25 bp, Artificial Sequence
  Synthetic Oligonucleotide
gtactcactcagacactctagggct

SEQ ID NO: 13768 - DNA, 25 bp, Artificial Sequence
  Synthetic Oligonucleotide
agatatatcagaaccgacagggtct

SEQ ID NO: 13769 - DNA, 25 bp, Artificial Sequence
  Synthetic Oligonucleotide
aggaggtttcattccgaagagaggt

SEQ ID NO: 13770 - DNA, 25 bp, Artificial Sequence
  Synthetic Oligonucleotide
aggagatttactggttcaaacaggt

SEQ ID NO: 13771 - DNA, 25 bp, Artificial Sequence
  Synthetic Oligonucleotide
ggaactgaatccttcgagaactcct

SEQ ID NO: 13772 - DNA, 25 bp, Artificial Sequence
  Synthetic Oligonucleotide
aacggcactcacctcagtatgacct

SEQ ID NO: 13773 - DNA, 25 bp, Artificial Sequence
  Synthetic Oligonucleotide
gcaatcatatacgttacgttagcat

SEQ ID NO: 13774 - DNA, 25 bp, Artificial Sequence
  Synthetic Oligonucleotide
ctcacgtaaccgtcgctagtcacgt

SEQ ID NO: 13775 - DNA, 25 bp, Artificial Sequence
  Synthetic Oligonucleotide
aaccacaacaacagcggctagccgt

SEQ ID NO: 13776 - DNA, 25 bp, Artificial Sequence
  Synthetic Oligonucleotide
aaccgacaccaaagcgatctatcat

SEQ ID NO: 13777 - DNA, 25 bp, Artificial Sequence
  Synthetic Oligonucleotide
atatcaacaccatcgtcatcacctt

SEQ ID NO: 13778 - DNA, 25 bp, Artificial Sequence
  Synthetic Oligonucleotide
gagtgtcacagaattccagaccctt

SEQ ID NO: 13779 - DNA, 25 bp, Artificial Sequence
  Synthetic Oligonucleotide
gtgttacaaaacatcacaaccttgt

SEQ ID NO: 13780 - DNA, 25 bp, Artificial Sequence
  Synthetic Oligonucleotide
ggtgtaaacaaccttccatcagttt

SEQ ID NO: 13781 - DNA, 25 bp, Artificial Sequence
  Synthetic Oligonucleotide
taggtgaaatggtctcaattttcgt

SEQ ID NO: 13782 - DNA, 25 bp, Artificial Sequence
  Synthetic Oligonucleotide
gtaacacatgggattcatgttatct

SEQ ID NO: 13783 - DNA, 25 bp, Artificial Sequence
  Synthetic Oligonucleotide
aaaccgtggacgtctactgttttct

SEQ ID NO: 13784 - DNA, 25 bp, Artificial Sequence
  Synthetic Oligonucleotide
aggtcgtgaggttgaccgtttctat

SEQ ID NO: 13785 - DNA, 25 bp, Artificial Sequence
  Synthetic Oligonucleotide
atacaggagaagtgagacctttcat

SEQ ID NO: 13786 - DNA, 25 bp, Artificial Sequence
  Synthetic Oligonucleotide
cccaccgaaaatcctaccgttccct

SEQ ID NO: 13787 - DNA, 25 bp, Artificial Sequence
  Synthetic Oligonucleotide
ccacagaaaaagtctaagaccccgt

SEQ ID NO: 13788 - DNA, 25 bp, Artificial Sequence
  Synthetic Oligonucleotide
ccatgaggatggactaaactccagt

SEQ ID NO: 13789 - DNA, 25 bp, Artificial Sequence
  Synthetic Oligonucleotide
aggaggtaatgaacaaactcctact

SEQ ID NO: 13790 - DNA, 25 bp, Artificial Sequence
  Synthetic Oligonucleotide
ggtatgaacagaccataaacctagt

SEQ ID NO: 13791 - DNA, 25 bp, Artificial Sequence
  Synthetic Oligonucleotide
acgatgaaaccttataacgaccact

SEQ ID NO: 13792 - DNA, 25 bp, Artificial Sequence
  Synthetic Oligonucleotide
aatgcgacaccttcgtaacggtcat

SEQ ID NO: 13793 - DNA, 25 bp, Artificial Sequence
  Synthetic Oligonucleotide
tcaagtgcagatccatataagttat

SEQ ID NO: 13794 - DNA, 25 bp, Artificial Sequence
  Synthetic Oligonucleotide
tatgaggtcataaacggtatttctt

SEQ ID NO: 13795 - DNA, 25 bp, Artificial Sequence
  Synthetic Oligonucleotide
tatgcgacgcaaagccgtcttgatt

SEQ ID NO: 13796 - DNA, 25 bp, Artificial Sequence
  Synthetic Oligonucleotide
aagcagactaccgtccctttactct

SEQ ID NO: 13797 - DNA, 25 bp, Artificial Sequence
  Synthetic Oligonucleotide
aatcgaatccggaaactgtacacct

SEQ ID NO: 13798 - DNA, 25 bp, Artificial Sequence
  Synthetic Oligonucleotide
acgtcgaaagggacatgtacgacct

SEQ ID NO: 13799 - DNA, 25 bp, Artificial Sequence
  Synthetic Oligonucleotide
cggtacaaggcgtaactcgacctct

SEQ ID NO: 13800 - DNA, 25 bp, Artificial Sequence
  Synthetic Oligonucleotide
cgagacagcgggtccgacctcacgt

SEQ ID NO: 13801 - DNA, 25 bp, Artificial Sequence
  Synthetic Oligonucleotide
gaccctcgggggactcgacatcagt

SEQ ID NO: 13802 - DNA, 25 bp, Artificial Sequence
  Synthetic Oligonucleotide
cctcaggtagtgctacggtcaccat

SEQ ID NO: 13803 - DNA, 25 bp, Artificial Sequence
  Synthetic Oligonucleotide
tgttcttgactgacgatctacacat

SEQ ID NO: 13804 - DNA, 25 bp, Artificial Sequence
  Synthetic Oligonucleotide
gtcttaccgactcaaattacgaagt

SEQ ID NO: 13805 - DNA, 25 bp, Artificial Sequence
  Synthetic Oligonucleotide
tcgtctctggtcgggaatcctaagt

SEQ ID NO: 13806 - DNA, 25 bp, Artificial Sequence
  Synthetic Oligonucleotide
gtccgccagagggtaggttcatgat

SEQ ID NO: 13807 - DNA, 25 bp, Artificial Sequence
  Synthetic Oligonucleotide
aggcgccaccggtcgctgcagtgct

SEQ ID NO: 13808 - DNA, 25 bp, Artificial Sequence
  Synthetic Oligonucleotide
agtgggcaccagtggtaccatccgt

SEQ ID NO: 13809 - DNA, 25 bp, Artificial Sequence
  Synthetic Oligonucleotide
gagttcggggtctggtaccatccgt

SEQ ID NO: 13810 - DNA, 25 bp, Artificial Sequence
  Synthetic Oligonucleotide
ttccgattcttgctggttacctttt

SEQ ID NO: 13811 - DNA, 25 bp, Artificial Sequence
  Synthetic Oligonucleotide
gaatcgttgtaaatctacctttagt

SEQ ID NO: 13812 - DNA, 25 bp, Artificial Sequence
  Synthetic Oligonucleotide
caaatatgatccataccatttacgt

SEQ ID NO: 13813 - DNA, 25 bp, Artificial Sequence
  Synthetic Oligonucleotide
acaaaagagtcgtaatacttttagt

SEQ ID NO: 13814 - DNA, 25 bp, Artificial Sequence
  Synthetic Oligonucleotide
tgactacaaagactcaatctctttt

SEQ ID NO: 13815 - DNA, 25 bp, Artificial Sequence
  Synthetic Oligonucleotide
tgttacaaaacatcacaaccttgtt

SEQ ID NO: 13816 - DNA, 25 bp, Artificial Sequence
  Synthetic Oligonucleotide
aagagaaagtcgtcaccacctcttt

SEQ ID NO: 13817 - DNA, 25 bp, Artificial Sequence
  Synthetic Oligonucleotide
gagaacgagcttcagatcccgttgt

SEQ ID NO: 13818 - DNA, 25 bp, Artificial Sequence
  Synthetic Oligonucleotide
gaagaccgtctcgactaccgcttct

SEQ ID NO: 13819 - DNA, 25 bp, Artificial Sequence
  Synthetic Oligonucleotide
cagctgctgctcgcgccgctatagt

SEQ ID NO: 13820 - DNA, 25 bp, Artificial Sequence
  Synthetic Oligonucleotide
acctagtctagcaggcggcctaggt

SEQ ID NO: 13821 - DNA, 25 bp, Artificial Sequence
  Synthetic Oligonucleotide
ccgtgtactagcgtagaggccgggt

SEQ ID NO: 13822 - DNA, 25 bp, Artificial Sequence
  Synthetic Oligonucleotide
aacgtctacatctcgggtcacaggt

SEQ ID NO: 13823 - DNA, 25 bp, Artificial Sequence
  Synthetic Oligonucleotide
gccgctctgtcgccgattcacagtt

SEQ ID NO: 13824 - DNA, 25 bp, Artificial Sequence
  Synthetic Oligonucleotide
ctaagctcttcgtcgctctctcttt

SEQ ID NO: 13825 - DNA, 25 bp, Artificial Sequence
  Synthetic Oligonucleotide
ggtcggttacttccaccgttctttt

SEQ ID NO: 13826 - DNA, 25 bp, Artificial Sequence
  Synthetic Oligonucleotide
gtcgtgtctattacgacatttttct

SEQ ID NO: 13827 - DNA, 25 bp, Artificial Sequence
  Synthetic Oligonucleotide
tgacggctaggtatgatttgctcgt

SEQ ID NO: 13828 - DNA, 25 bp, Artificial Sequence
  Synthetic Oligonucleotide
agtacggtcagtcattctcgtccgt

SEQ ID NO: 13829 - DNA, 25 bp, Artificial Sequence
  Synthetic Oligonucleotide
cgccaaggagagcatgactcgtcct

SEQ ID NO: 13830 - DNA, 25 bp, Artificial Sequence
  Synthetic Oligonucleotide
cgaccgaagagttctgctcgtcact

SEQ ID NO: 13831 - DNA, 25 bp, Artificial Sequence
  Synthetic Oligonucleotide
ccataggacgtcctcgactcgttct

SEQ ID NO: 13832 - DNA, 25 bp, Artificial Sequence
  Synthetic Oligonucleotide
caacagctgctgctcgcgtcgctat

SEQ ID NO: 13833 - DNA, 25 bp, Artificial Sequence
  Synthetic Oligonucleotide
tactccagcagcggaaggtctcagt

SEQ ID NO: 13834 - DNA, 25 bp, Artificial Sequence
  Synthetic Oligonucleotide
gtccagcacgacggtaagtgcctat

SEQ ID NO: 13835 - DNA, 25 bp, Artificial Sequence
  Synthetic Oligonucleotide
tccgttcgcgagatggtgactcgat

SEQ ID NO: 13836 - DNA, 25 bp, Artificial Sequence
  Synthetic Oligonucleotide
atgtgtgcacgatgttaccgcgtat

SEQ ID NO: 13837 - DNA, 25 bp, Artificial Sequence
  Synthetic Oligonucleotide
tcgtcgttctactcgtgctcctact

SEQ ID NO: 13838 - DNA, 25 bp, Artificial Sequence
  Synthetic Oligonucleotide
tctgtgtacgtccacggaaacgtct

SEQ ID NO: 13839 - DNA, 25 bp, Artificial Sequence
  Synthetic Oligonucleotide
tacttctggtacagccgcggaaggt

SEQ ID NO: 13840 - DNA, 25 bp, Artificial Sequence
  Synthetic Oligonucleotide
attcgtctaggactccggagtgatt

SEQ ID NO: 13841 - DNA, 25 bp, Artificial Sequence
  Synthetic Oligonucleotide
ttcgtaaacactaccgtggagatgt

SEQ ID NO: 13842 - DNA, 25 bp, Artificial Sequence
  Synthetic Oligonucleotide
gtctctagaagaagtccgggagttt

SEQ ID NO: 13843 - DNA, 25 bp, Artificial Sequence
  Synthetic Oligonucleotide
gtcaagaaggtgtcgctcgagtgat

SEQ ID NO: 13844 - DNA, 25 bp, Artificial Sequence
  Synthetic Oligonucleotide
tgcacaatggtctcttgtattacgt

SEQ ID NO: 13845 - DNA, 25 bp, Artificial Sequence
  Synthetic Oligonucleotide
cgtcctaatggtaccgttgttgtgt

SEQ ID NO: 13846 - DNA, 25 bp, Artificial Sequence
  Synthetic Oligonucleotide
ccgtatgtgttcgtcgttggtaggt

SEQ ID NO: 13847 - DNA, 25 bp, Artificial Sequence
  Synthetic Oligonucleotide
cctaatggtaccgttgttgtgtagt

SEQ ID NO: 13848 - DNA, 25 bp, Artificial Sequence
  Synthetic Oligonucleotide
tggtaggcgtacacttacttggcgt

SEQ ID NO: 13849 - DNA, 25 bp, Artificial Sequence
  Synthetic Oligonucleotide
cttggtaagcgtttacactttttgt

SEQ ID NO: 13850 - DNA, 25 bp, Artificial Sequence
  Synthetic Oligonucleotide
catcgaagatgttcttatttctggt

SEQ ID NO: 13851 - DNA, 25 bp, Artificial Sequence
  Synthetic Oligonucleotide
tgaacttcttcttcttctactatgt

SEQ ID NO: 13852 - DNA, 25 bp, Artificial Sequence
  Synthetic Oligonucleotide
tctaagctcttcgtcgctctctctt

SEQ ID NO: 13853 - DNA, 25 bp, Artificial Sequence
  Synthetic Oligonucleotide
ctgtcgtcatacattttcccttctt

SEQ ID NO: 13854 - DNA, 25 bp, Artificial Sequence
  Synthetic Oligonucleotide
gtcgtgaagtatttttccttactgt

SEQ ID NO: 13855 - DNA, 25 bp, Artificial Sequence
  Synthetic Oligonucleotide
tggtaaacgaccgtttctcttgtgt

SEQ ID NO: 13856 - DNA, 25 bp, Artificial Sequence
  Synthetic Oligonucleotide
tggaacagactctttctccagagtt

SEQ ID NO: 13857 - DNA, 25 bp, Artificial Sequence
  Synthetic Oligonucleotide
gactcgagagaccattcccagtctt

SEQ ID NO: 13858 - DNA, 25 bp, Artificial Sequence
  Synthetic Oligonucleotide
ggtacggctacttgctcccgacctt

SEQ ID NO: 13859 - DNA, 25 bp, Artificial Sequence
  Synthetic Oligonucleotide
gtcgtagaactgcctccgacaacct

SEQ ID NO: 13860 - DNA, 25 bp, Artificial Sequence
  Synthetic Oligonucleotide
cggtggtctgtcgtgacacaaccgt

SEQ ID NO: 13861 - DNA, 25 bp, Artificial Sequence
  Synthetic Oligonucleotide
cgacggcgctagcatgaccaccggt

SEQ ID NO: 13862 - DNA, 25 bp, Artificial Sequence
  Synthetic Oligonucleotide
tggtgcgcgacctagacgcaccggt

SEQ ID NO: 13863 - DNA, 25 bp, Artificial Sequence
  Synthetic Oligonucleotide
ggctctcgcgcgtagtgcaaccggt

SEQ ID NO: 13864 - DNA, 25 bp, Artificial Sequence
  Synthetic Oligonucleotide
aggacttgccatcgtagaactgctg

SEQ ID NO: 13865 - DNA, 25 bp, Artificial Sequence
  Synthetic Oligonucleotide
cagcagttctacgatggcaagtcct

SEQ ID NO: 13866 - DNA, 25 bp, Artificial Sequence
  Synthetic Oligonucleotide
tcctagtcgcggtccgtgagcgctt

SEQ ID NO: 13867 - DNA, 25 bp, Artificial Sequence
  Synthetic Oligonucleotide
tcccccaggttctgtgatcgacagt

SEQ ID NO: 13868 - DNA, 25 bp, Artificial Sequence
  Synthetic Oligonucleotide
acctaccggtgtttgtaccgtccgt

SEQ ID NO: 13869 - DNA, 25 bp, Artificial Sequence
  Synthetic Oligonucleotide
attatgcgtacttctgtcgtcgttt

SEQ ID NO: 13870 - DNA, 25 bp, Artificial Sequence
  Synthetic Oligonucleotide
cgtagtcgtcttgctcgtctctact

SEQ ID NO: 13871 - DNA, 25 bp, Artificial Sequence
  Synthetic Oligonucleotide
ggctaggtactgttgccgctctagt

SEQ ID NO: 13872 - DNA, 25 bp, Artificial Sequence
  Synthetic Oligonucleotide
aactctaggtcgcagtgctccctgt

SEQ ID NO: 13873 - DNA, 25 bp, Artificial Sequence
  Synthetic Oligonucleotide
cctaggtaccgcaagtccgtctcgt

SEQ ID NO: 13874 - DNA, 25 bp, Artificial Sequence
  Synthetic Oligonucleotide
cgctcgtgccggacgtcgtcgttct

SEQ ID NO: 13875 - DNA, 25 bp, Artificial Sequence
  Synthetic Oligonucleotide
cggaccgacccgtcgagtgtcgtct

SEQ ID NO: 13876 - DNA, 25 bp, Artificial Sequence
  Synthetic Oligonucleotide
ccctcaacgacatcttcagtgtcct

SEQ ID NO: 13877 - DNA, 25 bp, Artificial Sequence
  Synthetic Oligonucleotide
gccttaccagacgacttacctttct

SEQ ID NO: 13878 - DNA, 25 bp, Artificial Sequence
  Synthetic Oligonucleotide
gacaattctagagtttccgttctgt

SEQ ID NO: 13879 - DNA, 25 bp, Artificial Sequence
  Synthetic Oligonucleotide
caattctagactatccgttctgtgt

SEQ ID NO: 13880 - DNA, 25 bp, Artificial Sequence
  Synthetic Oligonucleotide
aagtctcagactagcagtcttctgt

SEQ ID NO: 13881 - DNA, 25 bp, Artificial Sequence
  Synthetic Oligonucleotide
acttcagacactaaaatcgtcgttt

SEQ ID NO: 13882 - DNA, 25 bp, Artificial Sequence
  Synthetic Oligonucleotide
actggaagtaccatctacctcggtt

SEQ ID NO: 13883 - DNA, 25 bp, Artificial Sequence
  Synthetic Oligonucleotide
acctgcggtcagtcgtacctcggct

SEQ ID NO: 13884 - DNA, 25 bp, Artificial Sequence
  Synthetic Oligonucleotide
tccttcagtctcaacgtcctctgct

SEQ ID NO: 13885 - DNA, 25 bp, Artificial Sequence
  Synthetic Oligonucleotide
tctgtcagtccgatgctgtctgtgt

SEQ ID NO: 13886 - DNA, 25 bp, Artificial Sequence
  Synthetic Oligonucleotide
ctttcgactcgaaccgactgttcct

SEQ ID NO: 13887 - DNA, 25 bp, Artificial Sequence
  Synthetic Oligonucleotide
catctgtcagtagagacgaggtcct

SEQ ID NO: 13888 - DNA, 25 bp, Artificial Sequence
  Synthetic Oligonucleotide
cccagtgtgtcaaacagagttttgt

SEQ ID NO: 13889 - DNA, 25 bp, Artificial Sequence
  Synthetic Oligonucleotide
ccgcatgttcagcaatgcctatagt

SEQ ID NO: 13890 - DNA, 25 bp, Artificial Sequence
  Synthetic Oligonucleotide
ccgtatctccagtaatgcctacagt

SEQ ID NO: 13891 - DNA, 25 bp, Artificial Sequence
  Synthetic Oligonucleotide
ctgacccacgagtagaccccgttgt

SEQ ID NO: 13892 - DNA, 25 bp, Artificial Sequence
  Synthetic Oligonucleotide
gtacgtccacggtaacgtctttgtt

SEQ ID NO: 13893 - DNA, 25 bp, Artificial Sequence
  Synthetic Oligonucleotide
gtactcactcagtcactctagggct

SEQ ID NO: 13894 - DNA, 25 bp, Artificial Sequence
  Synthetic Oligonucleotide
agatatatcagatccgacagggtct

SEQ ID NO: 13895 - DNA, 25 bp, Artificial Sequence
  Synthetic Oligonucleotide
aggaggtttcataccgaagagaggt

SEQ ID NO: 13896 - DNA, 25 bp, Artificial Sequence
  Synthetic Oligonucleotide
aggagatttactcgttcaaacaggt

SEQ ID NO: 13897 - DNA, 25 bp, Artificial Sequence
  Synthetic Oligonucleotide
ggaactgaatccatcgagaactcct

SEQ ID NO: 13898 - DNA, 25 bp, Artificial Sequence
  Synthetic Oligonucleotide
aacggcactcacgtcagtatgacct

SEQ ID NO: 13899 - DNA, 25 bp, Artificial Sequence
  Synthetic Oligonucleotide
gcaatcatataccttacgttagcat

SEQ ID NO: 13900 - DNA, 25 bp, Artificial Sequence
  Synthetic Oligonucleotide
ctcacgtaaccgacgctagtcacgt

SEQ ID NO: 13901 - DNA, 25 bp, Artificial Sequence
  Synthetic Oligonucleotide
aaccacaacaactgcggctagccgt

SEQ ID NO: 13902 - DNA, 25 bp, Artificial Sequence
  Synthetic Oligonucleotide
aaccgacaccaatgcgatctatcat

SEQ ID NO: 13903 - DNA, 25 bp, Artificial Sequence
  Synthetic Oligonucleotide
atatcaacaccaacgtcatcacctt

SEQ ID NO: 13904 - DNA, 25 bp, Artificial Sequence
  Synthetic Oligonucleotide
gagtgtcacagatttccagaccctt

SEQ ID NO: 13905 - DNA, 25 bp, Artificial Sequence
  Synthetic Oligonucleotide
gtgttacaaaacttcacaaccttgt

SEQ ID NO: 13906 - DNA, 25 bp, Artificial Sequence
  Synthetic Oligonucleotide
ggtgtaaacaacgttccatcagttt

SEQ ID NO: 13907 - DNA, 25 bp, Artificial Sequence
  Synthetic Oligonucleotide
taggtgaaatggactcaattttcgt

SEQ ID NO: 13908 - DNA, 25 bp, Artificial Sequence
  Synthetic Oligonucleotide
gtaacacatgggtttcatgttatct

SEQ ID NO: 13909 - DNA, 25 bp, Artificial Sequence
  Synthetic Oligonucleotide
aaaccgtggacgactactgttttct

SEQ ID NO: 13910 - DNA, 25 bp, Artificial Sequence
  Synthetic Oligonucleotide
aggtcgtgaggtagaccgtttctat

SEQ ID NO: 13911 - DNA, 25 bp, Artificial Sequence
  Synthetic Oligonucleotide
atacaggagaagagagacctttcat

SEQ ID NO: 13912 - DNA, 25 bp, Artificial Sequence
  Synthetic Oligonucleotide
cccaccgaaaatgctaccgttccct

SEQ ID NO: 13913 - DNA, 25 bp, Artificial Sequence
  Synthetic Oligonucleotide
ccacagaaaaagactaagaccccgt

SEQ ID NO: 13914 - DNA, 25 bp, Artificial Sequence
  Synthetic Oligonucleotide
ccatgaggatggtctaaactccagt

SEQ ID NO: 13915 - DNA, 25 bp, Artificial Sequence
  Synthetic Oligonucleotide
aggaggtaatgatcaaactcctact

SEQ ID NO: 13916 - DNA, 25 bp, Artificial Sequence
  Synthetic Oligonucleotide
ggtatgaacagagcataaacctagt

SEQ ID NO: 13917 - DNA, 25 bp, Artificial Sequence
  Synthetic Oligonucleotide
acgatgaaacctaataacgaccact

SEQ ID NO: 13918 - DNA, 25 bp, Artificial Sequence
  Synthetic Oligonucleotide
aatgcgacacctacgtaacggtcat

SEQ ID NO: 13919 - DNA, 25 bp, Artificial Sequence
  Synthetic Oligonucleotide
tcaagtgcagatgcatataagttat

SEQ ID NO: 13920 - DNA, 25 bp, Artificial Sequence
  Synthetic Oligonucleotide
tatgaggtcatatacggtatttctt

SEQ ID NO: 13921 - DNA, 25 bp, Artificial Sequence
  Synthetic Oligonucleotide
tatgcgacgcaatgccgtcttgatt

SEQ ID NO: 13922 - DNA, 25 bp, Artificial Sequence
  Synthetic Oligonucleotide
aagcagactaccctccctttactct

SEQ ID NO: 13923 - DNA, 25 bp, Artificial Sequence
  Synthetic Oligonucleotide
aatcgaatccggtaactgtacacct

SEQ ID NO: 13924 - DNA, 25 bp, Artificial Sequence
  Synthetic Oligonucleotide
acgtcgaaagggtcatgtacgacct

SEQ ID NO: 13925 - DNA, 25 bp, Artificial Sequence
  Synthetic Oligonucleotide
cggtacaaggcgaaactcgacctct

SEQ ID NO: 13926 - DNA, 25 bp, Artificial Sequence
  Synthetic Oligonucleotide
cgagacagcgggaccgacctcacgt

SEQ ID NO: 13927 - DNA, 25 bp, Artificial Sequence
  Synthetic Oligonucleotide
gaccctcgggggtctcgacatcagt

SEQ ID NO: 13928 - DNA, 25 bp, Artificial Sequence
  Synthetic Oligonucleotide
cctcaggtagtggtacggtcaccat

SEQ ID NO: 13929 - DNA, 25 bp, Artificial Sequence
  Synthetic Oligonucleotide
tgttcttgactgtcgatctacacat

SEQ ID NO: 13930 - DNA, 25 bp, Artificial Sequence
  Synthetic Oligonucleotide
gtcttaccgactgaaattacgaagt

SEQ ID NO: 13931 - DNA, 25 bp, Artificial Sequence
  Synthetic Oligonucleotide
tcgtctctggtccggaatcctaagt

SEQ ID NO: 13932 - DNA, 25 bp, Artificial Sequence
  Synthetic Oligonucleotide
gtccgccagaggctaggttcatgat

SEQ ID NO: 13933 - DNA, 25 bp, Artificial Sequence
  Synthetic Oligonucleotide
aggcgccaccggacgctgcagtgct

SEQ ID NO: 13934 - DNA, 25 bp, Artificial Sequence
  Synthetic Oligonucleotide
agtgggcaccagaggtaccatccgt

SEQ ID NO: 13935 - DNA, 25 bp, Artificial Sequence
  Synthetic Oligonucleotide
gagttcggggtcaggtaccatccgt

SEQ ID NO: 13936 - DNA, 25 bp, Artificial Sequence
  Synthetic Oligonucleotide
ttccgattcttggtggttacctttt

SEQ ID NO: 13937 - DNA, 25 bp, Artificial Sequence
  Synthetic Oligonucleotide
gaatcgttgtaattctacctttagt

SEQ ID NO: 13938 - DNA, 25 bp, Artificial Sequence
  Synthetic Oligonucleotide
caaatatgatccttaccatttacgt

SEQ ID NO: 13939 - DNA, 25 bp, Artificial Sequence
  Synthetic Oligonucleotide
acaaaagagtcgaaatacttttagt

SEQ ID NO: 13940 - DNA, 25 bp, Artificial Sequence
  Synthetic Oligonucleotide
tgactacaaagagtcaatctctttt

SEQ ID NO: 13941 - DNA, 25 bp, Artificial Sequence
  Synthetic Oligonucleotide
tgttacaaaacaacacaaccttgtt

SEQ ID NO: 13942 - DNA, 25 bp, Artificial Sequence
  Synthetic Oligonucleotide
aagagaaagtcgacaccacctcttt

SEQ ID NO: 13943 - DNA, 25 bp, Artificial Sequence
  Synthetic Oligonucleotide
gagaacgagcttgagatcccgttgt

SEQ ID NO: 13944 - DNA, 25 bp, Artificial Sequence
  Synthetic Oligonucleotide
gaagaccgtctccactaccgcttct

SEQ ID NO: 13945 - DNA, 25 bp, Artificial Sequence
  Synthetic Oligonucleotide
cagctgctgctcccgccgctatagt

SEQ ID NO: 13946 - DNA, 25 bp, Artificial Sequence
  Synthetic Oligonucleotide
acctagtctagctggcggcctaggt

SEQ ID NO: 13947 - DNA, 25 bp, Artificial Sequence
  Synthetic Oligonucleotide
ccgtgtactagcctagaggccgggt

SEQ ID NO: 13948 - DNA, 25 bp, Artificial Sequence
  Synthetic Oligonucleotide
aacgtctacatcacgggtcacaggt

SEQ ID NO: 13949 - DNA, 25 bp, Artificial Sequence
  Synthetic Oligonucleotide
gccgctctgtcggcgattcacagtt

SEQ ID NO: 13950 - DNA, 25 bp, Artificial Sequence
  Synthetic Oligonucleotide
ctaagctcttcgacgctctctcttt

SEQ ID NO: 13951 - DNA, 25 bp, Artificial Sequence
  Synthetic Oligonucleotide
ggtcggttacttgcaccgttctttt

SEQ ID NO: 13952 - DNA, 25 bp, Artificial Sequence
  Synthetic Oligonucleotide
gtcgtgtctatttcgacatttttct

SEQ ID NO: 13953 - DNA, 25 bp, Artificial Sequence
  Synthetic Oligonucleotide
tgacggctaggtttgatttgctcgt

SEQ ID NO: 13954 - DNA, 25 bp, Artificial Sequence
  Synthetic Oligonucleotide
agtacggtcagtgattctcgtccgt

SEQ ID NO: 13955 - DNA, 25 bp, Artificial Sequence
  Synthetic Oligonucleotide
cgccaaggagaggatgactcgtcct

SEQ ID NO: 13956 - DNA, 25 bp, Artificial Sequence
  Synthetic Oligonucleotide
cgaccgaagagtactgctcgtcact

SEQ ID NO: 13957 - DNA, 25 bp, Artificial Sequence
  Synthetic Oligonucleotide
ccataggacgtcgtcgactcgttct

SEQ ID NO: 13958 - DNA, 25 bp, Artificial Sequence
  Synthetic Oligonucleotide
caacagctgctggtcgcgtcgctat

SEQ ID NO: 13959 - DNA, 25 bp, Artificial Sequence
  Synthetic Oligonucleotide
tactccagcagccgaaggtctcagt

SEQ ID NO: 13960 - DNA, 25 bp, Artificial Sequence
  Synthetic Oligonucleotide
gtccagcacgaccgtaagtgcctat

SEQ ID NO: 13961 - DNA, 25 bp, Artificial Sequence
  Synthetic Oligonucleotide
tccgttcgcgagttggtgactcgat

SEQ ID NO: 13962 - DNA, 25 bp, Artificial Sequence
  Synthetic Oligonucleotide
atgtgtgcacgaagttaccgcgtat

SEQ ID NO: 13963 - DNA, 25 bp, Artificial Sequence
  Synthetic Oligonucleotide
tcgtcgttctacacgtgctcctact

SEQ ID NO: 13964 - DNA, 25 bp, Artificial Sequence
  Synthetic Oligonucleotide
tctgtgtacgtcgacggaaacgtct

SEQ ID NO: 13965 - DNA, 25 bp, Artificial Sequence
  Synthetic Oligonucleotide
tacttctggtactgccgcggaaggt

SEQ ID NO: 13966 - DNA, 25 bp, Artificial Sequence
  Synthetic Oligonucleotide
attcgtctaggagtccggagtgatt

SEQ ID NO: 13967 - DNA, 25 bp, Artificial Sequence
  Synthetic Oligonucleotide
ttcgtaaacacttccgtggagatgt

SEQ ID NO: 13968 - DNA, 25 bp, Artificial Sequence
  Synthetic Oligonucleotide
gtctctagaagatgtccgggagttt

SEQ ID NO: 13969 - DNA, 25 bp, Artificial Sequence
  Synthetic Oligonucleotide
gtcaagaaggtgacgctcgagtgat

SEQ ID NO: 13970 - DNA, 25 bp, Artificial Sequence
  Synthetic Oligonucleotide
tgcacaatggtcacttgtattacgt

SEQ ID NO: 13971 - DNA, 25 bp, Artificial Sequence
  Synthetic Oligonucleotide
cgtcctaatggttccgttgttgtgt

SEQ ID NO: 13972 - DNA, 25 bp, Artificial Sequence
  Synthetic Oligonucleotide
ccgtatgtgttcctcgttggtaggt

SEQ ID NO: 13973 - DNA, 25 bp, Artificial Sequence
  Synthetic Oligonucleotide
cctaatggtacccttgttgtgtagt

SEQ ID NO: 13974 - DNA, 25 bp, Artificial Sequence
  Synthetic Oligonucleotide
tggtaggcgtactcttacttggcgt

SEQ ID NO: 13975 - DNA, 25 bp, Artificial Sequence
  Synthetic Oligonucleotide
cttggtaagcgtatacactttttgt

SEQ ID NO: 13976 - DNA, 25 bp, Artificial Sequence
  Synthetic Oligonucleotide
catcgaagatgtacttatttctggt

SEQ ID NO: 13977 - DNA, 25 bp, Artificial Sequence
  Synthetic Oligonucleotide
tgaacttcttctacttctactatgt

SEQ ID NO: 13978 - DNA, 25 bp, Artificial Sequence
  Synthetic Oligonucleotide
tctaagctcttcctcgctctctctt

SEQ ID NO: 13979 - DNA, 25 bp, Artificial Sequence
  Synthetic Oligonucleotide
ctgtcgtcatactttttcccttctt

SEQ ID NO: 13980 - DNA, 25 bp, Artificial Sequence
  Synthetic Oligonucleotide
gtcgtgaagtatatttccttactgt

SEQ ID NO: 13981 - DNA, 25 bp, Artificial Sequence
  Synthetic Oligonucleotide
tggtaaacgaccctttctcttgtgt

SEQ ID NO: 13982 - DNA, 25 bp, Artificial Sequence
  Synthetic Oligonucleotide
tggaacagactcattctccagagtt

SEQ ID NO: 13983 - DNA, 25 bp, Artificial Sequence
  Synthetic Oligonucleotide
gactcgagagacgattcccagtctt

SEQ ID NO: 13984 - DNA, 25 bp, Artificial Sequence
  Synthetic Oligonucleotide
ggtacggctactagctcccgacctt

SEQ ID NO: 13985 - DNA, 25 bp, Artificial Sequence
  Synthetic Oligonucleotide
gtcgtagaactggctccgacaacct

SEQ ID NO: 13986 - DNA, 25 bp, Artificial Sequence
  Synthetic Oligonucleotide
cggtggtctgtcctgacacaaccgt

SEQ ID NO: 13987 - DNA, 25 bp, Artificial Sequence
  Synthetic Oligonucleotide
cgacggcgctaggatgaccaccggt

SEQ ID NO: 13988 - DNA, 25 bp, Artificial Sequence
  Synthetic Oligonucleotide
tggtgcgcgaccaagacgcaccggt

SEQ ID NO: 13989 - DNA, 25 bp, Artificial Sequence
  Synthetic Oligonucleotide
ggctctcgcgcgaagtgcaaccggt

SEQ ID NO: 13990 - DNA, 25 bp, Artificial Sequence
  Synthetic Oligonucleotide
cagcagttctacgatggcaagtcct

SEQ ID NO: 13991 - DNA, 25 bp, Artificial Sequence
  Synthetic Oligonucleotide
aggacttgccatcgtagaactgctg

SEQ ID NO: 13992 - DNA, 25 bp, Artificial Sequence
  Synthetic Oligonucleotide
gtatagtaaccgttactggggctat

SEQ ID NO: 13993 - DNA, 25 bp, Artificial Sequence
  Synthetic Oligonucleotide
cgttgttacggtcgtggacggacat

SEQ ID NO: 13994 - DNA, 25 bp, Artificial Sequence
  Synthetic Oligonucleotide
tttatacgtagtgggtgtaggtcat

SEQ ID NO: 13995 - DNA, 25 bp, Artificial Sequence
  Synthetic Oligonucleotide
aaatttcacgttggttagactcagt

SEQ ID NO: 13996 - DNA, 25 bp, Artificial Sequence
  Synthetic Oligonucleotide
tagtattacacttggtaccgttcct

SEQ ID NO: 13997 - DNA, 25 bp, Artificial Sequence
  Synthetic Oligonucleotide
agtaatgtctactcggtactgccct

SEQ ID NO: 13998 - DNA, 25 bp, Artificial Sequence
  Synthetic Oligonucleotide
aggacttgccatcgtagaactgctg

SEQ ID NO: 13999 - DNA, 25 bp, Artificial Sequence
  Synthetic Oligonucleotide
cagcagttctacgatggcaagtcct

SEQ ID NO: 14000 - DNA, 25 bp, Artificial Sequence
  Synthetic Oligonucleotide
ggccggcacgcatgaatctgtacgt

SEQ ID NO: 14001 - DNA, 25 bp, Artificial Sequence
  Synthetic Oligonucleotide
gctttagtcacggaaacttgtgact

SEQ ID NO: 14002 - DNA, 25 bp, Artificial Sequence
  Synthetic Oligonucleotide
tttctggtatgtcaaaacttggact

SEQ ID NO: 14003 - DNA, 25 bp, Artificial Sequence
  Synthetic Oligonucleotide
gttttggccgaaatgtgtatggtct

SEQ ID NO: 14004 - DNA, 25 bp, Artificial Sequence
  Synthetic Oligonucleotide
attattgtctcaaaatgctaggctt

SEQ ID NO: 14005 - DNA, 25 bp, Artificial Sequence
  Synthetic Oligonucleotide
ttggttcactcaatcgactctgatt

SEQ ID NO: 14006 - DNA, 25 bp, Artificial Sequence
  Synthetic Oligonucleotide
gagttctgctcgtcactctagttgt

SEQ ID NO: 14007 - DNA, 25 bp, Artificial Sequence
  Synthetic Oligonucleotide
gttctctacttatacactcgttgat

SEQ ID NO: 14008 - DNA, 25 bp, Artificial Sequence
  Synthetic Oligonucleotide
tctcctgtcgaacctaccgctgtat

SEQ ID NO: 14009 - DNA, 25 bp, Artificial Sequence
  Synthetic Oligonucleotide
tcgttccgtcaaacaccacgtcgat

SEQ ID NO: 14010 - DNA, 25 bp, Artificial Sequence
  Synthetic Oligonucleotide
tcgttccgtcaaacaccacgtcgat

SEQ ID NO: 14011 - DNA, 25 bp, Artificial Sequence
  Synthetic Oligonucleotide
tcgttccgtcaatcaccacgtcgat

SEQ ID NO: 14012 - DNA, 25 bp, Artificial Sequence
  Synthetic Oligonucleotide
attcggtcgaactgacgctcgcact

SEQ ID NO: 14013 - DNA, 25 bp, Artificial Sequence
  Synthetic Oligonucleotide
ttctgtctaccaagacgtccgtcct

SEQ ID NO: 14014 - DNA, 25 bp, Artificial Sequence
  Synthetic Oligonucleotide
tgactcgtcctaatggtaccgttgt

SEQ ID NO: 14015 - DNA, 25 bp, Artificial Sequence
  Synthetic Oligonucleotide
ttaatcttcgtaaaggacacgtgtt

SEQ ID NO: 14016 - DNA, 25 bp, Artificial Sequence
  Synthetic Oligonucleotide
taatctatgtcctcgtctactatgt

SEQ ID NO: 14017 - DNA, 25 bp, Artificial Sequence
  Synthetic Oligonucleotide
tcttctaagctcttcgtcgctctct

SEQ ID NO: 14018 - DNA, 25 bp, Artificial Sequence
  Synthetic Oligonucleotide
tcggtccaggtctgcgtcctaccgt

SEQ ID NO: 14019 - DNA, 25 bp, Artificial Sequence
  Synthetic Oligonucleotide
tacggtcgtccgtggagtctccact

SEQ ID NO: 14020 - DNA, 25 bp, Artificial Sequence
  Synthetic Oligonucleotide
aggacttgccatcgtagaactgctg

SEQ ID NO: 14021 - DNA, 25 bp, Artificial Sequence
  Synthetic Oligonucleotide
cagcagttctacgatggcaagtcct

SEQ ID NO: 14022 - DNA, 25 bp, Artificial Sequence
  Synthetic Oligonucleotide
cggagctttctcaggacataacaat

SEQ ID NO: 14023 - DNA, 25 bp, Artificial Sequence
  Synthetic Oligonucleotide
gagcctatactcaggacataacaat

SEQ ID NO: 14024 - DNA, 25 bp, Artificial Sequence
  Synthetic Oligonucleotide
atcgtacggtctcagagcaagcaat

SEQ ID NO: 14025 - DNA, 25 bp, Artificial Sequence
  Synthetic Oligonucleotide
caatcgtgctcgacgcagtagaaat

SEQ ID NO: 14026 - DNA, 25 bp, Artificial Sequence
  Synthetic Oligonucleotide
agcgtcgctccctcgacgagacgat

SEQ ID NO: 14027 - DNA, 25 bp, Artificial Sequence
  Synthetic Oligonucleotide
gcttgggtcccggaacgcgaacgat

SEQ ID NO: 14028 - DNA, 25 bp, Artificial Sequence
  Synthetic Oligonucleotide
catgaaccgcacgaccgactaaagt

SEQ ID NO: 14029 - DNA, 25 bp, Artificial Sequence
  Synthetic Oligonucleotide
gatagaagcaacgtacactcaacat

SEQ ID NO: 14030 - DNA, 25 bp, Artificial Sequence
  Synthetic Oligonucleotide
tgttaagaccgagtatcctcctctt

SEQ ID NO: 14031 - DNA, 25 bp, Artificial Sequence
  Synthetic Oligonucleotide
tgaacagaccataaacctagtttgt

SEQ ID NO: 14032 - DNA, 25 bp, Artificial Sequence
  Synthetic Oligonucleotide
gatcgaataaatgtaccctattgtt

SEQ ID NO: 14033 - DNA, 25 bp, Artificial Sequence
  Synthetic Oligonucleotide
agtggttacaatgtactctttcttt

SEQ ID NO: 14034 - DNA, 25 bp, Artificial Sequence
  Synthetic Oligonucleotide
gttgaactgatcgctataagcttct

SEQ ID NO: 14035 - DNA, 25 bp, Artificial Sequence
  Synthetic Oligonucleotide
gccgaaagtatcgctattctcttct

SEQ ID NO: 14036 - DNA, 25 bp, Artificial Sequence
  Synthetic Oligonucleotide
ccgtcatcgccagtatctactttat

SEQ ID NO: 14037 - DNA, 25 bp, Artificial Sequence
  Synthetic Oligonucleotide
ccggtgtgcgtcgagtaacatcttt

SEQ ID NO: 14038 - DNA, 25 bp, Artificial Sequence
  Synthetic Oligonucleotide
ccagtgagagttagactctctcttt

SEQ ID NO: 14039 - DNA, 25 bp, Artificial Sequence
  Synthetic Oligonucleotide
ccatcgagtagatttgaactttatt

SEQ ID NO: 14040 - DNA, 25 bp, Artificial Sequence
  Synthetic Oligonucleotide
atatatcgaagttttcgaaccattt

SEQ ID NO: 14041 - DNA, 25 bp, Artificial Sequence
  Synthetic Oligonucleotide
agtagggtttacctgaaccggtctt

SEQ ID NO: 14042 - DNA, 25 bp, Artificial Sequence
  Synthetic Oligonucleotide
aggacttgccatcgtagaactgctg

SEQ ID NO: 14043 - DNA, 25 bp, Artificial Sequence
  Synthetic Oligonucleotide
cagcagttctacgatggcaagtcct

SEQ ID NO: 14044 - DNA, 25 bp, Artificial Sequence
  Synthetic Oligonucleotide
aacttcagacacttaaatcgtcgtt

SEQ ID NO: 14045 - DNA, 25 bp, Artificial Sequence
  Synthetic Oligonucleotide
ccagacttgagatgcacaatggtct

SEQ ID NO: 14046 - DNA, 25 bp, Artificial Sequence
  Synthetic Oligonucleotide
acagtacgaatatccatctaggtct

SEQ ID NO: 14047 - DNA, 25 bp, Artificial Sequence
  Synthetic Oligonucleotide
aacacgagtcaattaccatctaaat

SEQ ID NO: 14048 - DNA, 25 bp, Artificial Sequence
  Synthetic Oligonucleotide
ataactctgacatggtcattttaat

SEQ ID NO: 14049 - DNA, 25 bp, Artificial Sequence
  Synthetic Oligonucleotide
aagtctgagacttgcgatttcaact

SEQ ID NO: 14050 - DNA, 25 bp, Artificial Sequence
  Synthetic Oligonucleotide
gtctggcgcgcggacttctatatct

SEQ ID NO: 14051 - DNA, 25 bp, Artificial Sequence
  Synthetic Oligonucleotide
gcgtccgcggcgaacgatcgaacct

SEQ ID NO: 14052 - DNA, 25 bp, Artificial Sequence
  Synthetic Oligonucleotide
cggagtcggagggctcatcgaccct

SEQ ID NO: 14053 - DNA, 25 bp, Artificial Sequence
  Synthetic Oligonucleotide
tggagccggagggtttcacgaccct

SEQ ID NO: 14054 - DNA, 25 bp, Artificial Sequence
  Synthetic Oligonucleotide
gaggcacgggcgtttcttgtccagt

SEQ ID NO: 14055 - DNA, 25 bp, Artificial Sequence
  Synthetic Oligonucleotide
gggtccccgacgtgcttccacgagt

SEQ ID NO: 14056 - DNA, 25 bp, Artificial Sequence
  Synthetic Oligonucleotide
ggtcatcgtccgtcgaatccgaggt

SEQ ID NO: 14057 - DNA, 25 bp, Artificial Sequence
  Synthetic Oligonucleotide
actcctacggtctcgatacccaggt

SEQ ID NO: 14058 - DNA, 25 bp, Artificial Sequence
  Synthetic Oligonucleotide
agccgaggtacgtctgaccgcaggt

SEQ ID NO: 14059 - DNA, 25 bp, Artificial Sequence
  Synthetic Oligonucleotide
tcgaaacggacgtctgggtatgagt

SEQ ID NO: 14060 - DNA, 25 bp, Artificial Sequence
  Synthetic Oligonucleotide
cacgaccggagaaggtcggtattct

SEQ ID NO: 14061 - DNA, 25 bp, Artificial Sequence
  Synthetic Oligonucleotide
gggagaccgggaagagcgtcttcct

SEQ ID NO: 14062 - DNA, 25 bp, Artificial Sequence
  Synthetic Oligonucleotide
cgggtcttagggttggtgtcttcct

SEQ ID NO: 14063 - DNA, 25 bp, Artificial Sequence
  Synthetic Oligonucleotide
gggaggtagcgtcattggtcttcat

SEQ ID NO: 14064 - DNA, 25 bp, Artificial Sequence
  Synthetic Oligonucleotide
aggacttgccatcgtagaactgctg

SEQ ID NO: 14065 - DNA, 25 bp, Artificial Sequence
  Synthetic Oligonucleotide
cagcagttctacgatggcaagtcct

SEQ ID NO: 14066 - DNA, 25 bp, Artificial Sequence
  Synthetic Oligonucleotide
tagtggtaatacctatgcatgactt

SEQ ID NO: 14067 - DNA, 25 bp, Artificial Sequence
  Synthetic Oligonucleotide
tcttaaagaaatgacttacatgctt

SEQ ID NO: 14068 - DNA, 25 bp, Artificial Sequence
  Synthetic Oligonucleotide
tctaaaaacagtacgatgaaacctt

SEQ ID NO: 14069 - DNA, 25 bp, Artificial Sequence
  Synthetic Oligonucleotide
ttttataagaccaagggaacatctt

SEQ ID NO: 14070 - DNA, 25 bp, Artificial Sequence
  Synthetic Oligonucleotide
taaagagaaagtcgtcaccacctct

SEQ ID NO: 14071 - DNA, 25 bp, Artificial Sequence
  Synthetic Oligonucleotide
aagtagtaatcgttccactgcctat

SEQ ID NO: 14072 - DNA, 25 bp, Artificial Sequence
  Synthetic Oligonucleotide
ggggagtatctaaccatgtcacact

SEQ ID NO: 14073 - DNA, 25 bp, Artificial Sequence
  Synthetic Oligonucleotide
ggtggtacaccaacgaccctaaact

SEQ ID NO: 14074 - DNA, 25 bp, Artificial Sequence
  Synthetic Oligonucleotide
cgatggtacaccaacgacccaaact

SEQ ID NO: 14075 - DNA, 25 bp, Artificial Sequence
  Synthetic Oligonucleotide
gtgttcgccacctcgtacaccaaat

SEQ ID NO: 14076 - DNA, 25 bp, Artificial Sequence
  Synthetic Oligonucleotide
gtgttcgccacctcgtacaccaaat

SEQ ID NO: 14077 - DNA, 25 bp, Artificial Sequence
  Synthetic Oligonucleotide
gtgttcgccacctcgtacaccaaat

SEQ ID NO: 14078 - DNA, 25 bp, Artificial Sequence
  Synthetic Oligonucleotide
ggtcgttcacagactgaagcgaatt

SEQ ID NO: 14079 - DNA, 25 bp, Artificial Sequence
  Synthetic Oligonucleotide
cgtagtccgtagactaatttaactt

SEQ ID NO: 14080 - DNA, 25 bp, Artificial Sequence
  Synthetic Oligonucleotide
gtttcagaactgcttctagacgtat

SEQ ID NO: 14081 - DNA, 25 bp, Artificial Sequence
  Synthetic Oligonucleotide
gtcaagaaacagctttacgcgtact

SEQ ID NO: 14082 - DNA, 25 bp, Artificial Sequence
  Synthetic Oligonucleotide
atgaaagaaagacctcctcgttact

SEQ ID NO: 14083 - DNA, 25 bp, Artificial Sequence
  Synthetic Oligonucleotide
ttaagcaacagtatggtcctttact

SEQ ID NO: 14084 - DNA, 25 bp, Artificial Sequence
  Synthetic Oligonucleotide
taagatatctagtttggtcctttgt

SEQ ID NO: 14085 - DNA, 25 bp, Artificial Sequence
  Synthetic Oligonucleotide
gactcgtcctaatggtaccgttgtt

SEQ ID NO: 14086 - DNA, 25 bp, Artificial Sequence
  Synthetic Oligonucleotide
aggacttgccatcgtagaactgctg

SEQ ID NO: 14087 - DNA, 25 bp, Artificial Sequence
  Synthetic Oligonucleotide
cagcagttctacgatggcaagtcct

SEQ ID NO: 14088 - DNA, 25 bp, Artificial Sequence
  Synthetic Oligonucleotide
gacatagtagacgaggacatagatt

SEQ ID NO: 14089 - DNA, 25 bp, Artificial Sequence
  Synthetic Oligonucleotide
gaagatgtgcccgctagtcgactat

SEQ ID NO: 14090 - DNA, 25 bp, Artificial Sequence
  Synthetic Oligonucleotide
aagtattttgccttaggtagtcctt

SEQ ID NO: 14091 - DNA, 25 bp, Artificial Sequence
  Synthetic Oligonucleotide
gatagttatttctcacgctgacatt

SEQ ID NO: 14092 - DNA, 25 bp, Artificial Sequence
  Synthetic Oligonucleotide
cgactagtgtttacccgtgggaaat

SEQ ID NO: 14093 - DNA, 25 bp, Artificial Sequence
  Synthetic Oligonucleotide
tagtacggattaacccttggaccat

SEQ ID NO: 14094 - DNA, 25 bp, Artificial Sequence
  Synthetic Oligonucleotide
agtagtgagcaacgtagctggccat

SEQ ID NO: 14095 - DNA, 25 bp, Artificial Sequence
  Synthetic Oligonucleotide
agtaacacaaaggtaactggcactt

SEQ ID NO: 14096 - DNA, 25 bp, Artificial Sequence
  Synthetic Oligonucleotide
tcgacgtaacagtgggctatgaatt

SEQ ID NO: 14097 - DNA, 25 bp, Artificial Sequence
  Synthetic Oligonucleotide
tccaaagaggtccgccgtgcagtct

SEQ ID NO: 14098 - DNA, 25 bp, Artificial Sequence
  Synthetic Oligonucleotide
cagagggtccgtcagtcgctgtact

SEQ ID NO: 14099 - DNA, 25 bp, Artificial Sequence
  Synthetic Oligonucleotide
caggacaaggttccttgtatctgtt

SEQ ID NO: 14100 - DNA, 25 bp, Artificial Sequence
  Synthetic Oligonucleotide
cgaaagtgtacacttgtagtcgttt

SEQ ID NO: 14101 - DNA, 25 bp, Artificial Sequence
  Synthetic Oligonucleotide
aagcacacctaatgactgatctctt

SEQ ID NO: 14102 - DNA, 25 bp, Artificial Sequence
  Synthetic Oligonucleotide
aaagaaataccgtttatgacctcat

SEQ ID NO: 14103 - DNA, 25 bp, Artificial Sequence
  Synthetic Oligonucleotide
aacagaatcaagtttaacctatagt

SEQ ID NO: 14104 - DNA, 25 bp, Artificial Sequence
  Synthetic Oligonucleotide
tcgaaactgtaatagttaccacagt

SEQ ID NO: 14105 - DNA, 25 bp, Artificial Sequence
  Synthetic Oligonucleotide
ccggaagtgtaagagctatcacagt

SEQ ID NO: 14106 - DNA, 25 bp, Artificial Sequence
  Synthetic Oligonucleotide
gaggcaagtggtagagtcttcctat

SEQ ID NO: 14107 - DNA, 25 bp, Artificial Sequence
  Synthetic Oligonucleotide
agtgcaggtcggttcagttctgcct

SEQ ID NO: 14108 - DNA, 25 bp, Artificial Sequence
  Synthetic Oligonucleotide
aggacttgccatcgtagaactgctg

SEQ ID NO: 14109 - DNA, 25 bp, Artificial Sequence
  Synthetic Oligonucleotide
cagcagttctacgatggcaagtcct

SEQ ID NO: 14110 - DNA, 25 bp, Artificial Sequence
  Synthetic Oligonucleotide
ggtcgggctgatgacgaatcttcgt

SEQ ID NO: 14111 - DNA, 25 bp, Artificial Sequence
  Synthetic Oligonucleotide
acgtcggtacggcgcacatacttct

SEQ ID NO: 14112 - DNA, 25 bp, Artificial Sequence
  Synthetic Oligonucleotide
aacgggtaccgctgaccgctcatct

SEQ ID NO: 14113 - DNA, 25 bp, Artificial Sequence
  Synthetic Oligonucleotide
aggtctgcgtactaccgcacaccgt

SEQ ID NO: 14114 - DNA, 25 bp, Artificial Sequence
  Synthetic Oligonucleotide
gacggggtctacacaccactcgtgt

SEQ ID NO: 14115 - DNA, 25 bp, Artificial Sequence
  Synthetic Oligonucleotide
gcgacgtggcacaggactcctctgt

SEQ ID NO: 14116 - DNA, 25 bp, Artificial Sequence
  Synthetic Oligonucleotide
aggacttgccatcgtagaactgctg

SEQ ID NO: 14117 - DNA, 25 bp, Artificial Sequence
  Synthetic Oligonucleotide
cagcagttctacgatggcaagtcct

SEQ ID NO: 14118 - DNA, 25 bp, Artificial Sequence
  Synthetic Oligonucleotide
gtatagtaaccgatactggggctat

SEQ ID NO: 14119 - DNA, 25 bp, Artificial Sequence
  Synthetic Oligonucleotide
cgttgttacggtggtggacggacat

SEQ ID NO: 14120 - DNA, 25 bp, Artificial Sequence
  Synthetic Oligonucleotide
tttatacgtagtcggtgtaggtcat

SEQ ID NO: 14121 - DNA, 25 bp, Artificial Sequence
  Synthetic Oligonucleotide
aaatttcacgttcgttagactcagt

SEQ ID NO: 14122 - DNA, 25 bp, Artificial Sequence
  Synthetic Oligonucleotide
tagtattacactaggtaccgttcct

SEQ ID NO: 14123 - DNA, 25 bp, Artificial Sequence
  Synthetic Oligonucleotide
agtaatgtctacacggtactgccct

SEQ ID NO: 14124 - DNA, 25 bp, Artificial Sequence
  Synthetic Oligonucleotide
cagcagttctacgatggcaagtcct

SEQ ID NO: 14125 - DNA, 25 bp, Artificial Sequence
  Synthetic Oligonucleotide
aggacttgccatcgtagaactgctg

SEQ ID NO: 14126 - DNA, 25 bp, Artificial Sequence
  Synthetic Oligonucleotide
ggccggcacgcaagaatctgtacgt

SEQ ID NO: 14127 - DNA, 25 bp, Artificial Sequence
  Synthetic Oligonucleotide
gctttagtcacgcaaacttgtgact

SEQ ID NO: 14128 - DNA, 25 bp, Artificial Sequence
  Synthetic Oligonucleotide
tttctggtatgtgaaaacttggact

SEQ ID NO: 14129 - DNA, 25 bp, Artificial Sequence
  Synthetic Oligonucleotide
gttttggccgaattgtgtatggtct

SEQ ID NO: 14130 - DNA, 25 bp, Artificial Sequence
  Synthetic Oligonucleotide
attattgtctcataatgctaggctt

SEQ ID NO: 14131 - DNA, 25 bp, Artificial Sequence
  Synthetic Oligonucleotide
ttggttcactcattcgactctgatt

SEQ ID NO: 14132 - DNA, 25 bp, Artificial Sequence
  Synthetic Oligonucleotide
gagttctgctcgacactctagttgt

SEQ ID NO: 14133 - DNA, 25 bp, Artificial Sequence
  Synthetic Oligonucleotide
gttctctacttaaacactcgttgat

SEQ ID NO: 14134 - DNA, 25 bp, Artificial Sequence
  Synthetic Oligonucleotide
tctcctgtcgaagctaccgctgtat

SEQ ID NO: 14135 - DNA, 25 bp, Artificial Sequence
  Synthetic Oligonucleotide
tcgttccgtcaatcaccacgtcgat

SEQ ID NO: 14136 - DNA, 25 bp, Artificial Sequence
  Synthetic Oligonucleotide
tcgttccgtcaatcaccacgtcgat

SEQ ID NO: 14137 - DNA, 25 bp, Artificial Sequence
  Synthetic Oligonucleotide
tcgttccgtcaaacaccacgtcgat

SEQ ID NO: 14138 - DNA, 25 bp, Artificial Sequence
  Synthetic Oligonucleotide
attcggtcgaacagacgctcgcact

SEQ ID NO: 14139 - DNA, 25 bp, Artificial Sequence
  Synthetic Oligonucleotide
ttctgtctaccatgacgtccgtcct

SEQ ID NO: 14140 - DNA, 25 bp, Artificial Sequence
  Synthetic Oligonucleotide
tgactcgtcctattggtaccgttgt

SEQ ID NO: 14141 - DNA, 25 bp, Artificial Sequence
  Synthetic Oligonucleotide
ttaatcttcgtataggacacgtgtt

SEQ ID NO: 14142 - DNA, 25 bp, Artificial Sequence
  Synthetic Oligonucleotide
taatctatgtccacgtctactatgt

SEQ ID NO: 14143 - DNA, 25 bp, Artificial Sequence
  Synthetic Oligonucleotide
tcttctaagctcatcgtcgctctct

SEQ ID NO: 14144 - DNA, 25 bp, Artificial Sequence
  Synthetic Oligonucleotide
tcggtccaggtcagcgtcctaccgt

SEQ ID NO: 14145 - DNA, 25 bp, Artificial Sequence
  Synthetic Oligonucleotide
tacggtcgtccgaggagtctccact

SEQ ID NO: 14146 - DNA, 25 bp, Artificial Sequence
  Synthetic Oligonucleotide
cagcagttctacgatggcaagtcct

SEQ ID NO: 14147 - DNA, 25 bp, Artificial Sequence
  Synthetic Oligonucleotide
aggacttgccatcgtagaactgctg

SEQ ID NO: 14148 - DNA, 25 bp, Artificial Sequence
  Synthetic Oligonucleotide
cggagctttctctggacataacaat

SEQ ID NO: 14149 - DNA, 25 bp, Artificial Sequence
  Synthetic Oligonucleotide
gagcctatactctggacataacaat

SEQ ID NO: 14150 - DNA, 25 bp, Artificial Sequence
  Synthetic Oligonucleotide
atcgtacggtctgagagcaagcaat

SEQ ID NO: 14151 - DNA, 25 bp, Artificial Sequence
  Synthetic Oligonucleotide
caatcgtgctcgtcgcagtagaaat

SEQ ID NO: 14152 - DNA, 25 bp, Artificial Sequence
  Synthetic Oligonucleotide
agcgtcgctcccacgacgagacgat

SEQ ID NO: 14153 - DNA, 25 bp, Artificial Sequence
  Synthetic Oligonucleotide
gcttgggtcccgcaacgcgaacgat

SEQ ID NO: 14154 - DNA, 25 bp, Artificial Sequence
  Synthetic Oligonucleotide
catgaaccgcaccaccgactaaagt

SEQ ID NO: 14155 - DNA, 25 bp, Artificial Sequence
  Synthetic Oligonucleotide
gatagaagcaacctacactcaacat

SEQ ID NO: 14156 - DNA, 25 bp, Artificial Sequence
  Synthetic Oligonucleotide
tgttaagaccgactatcctcctctt

SEQ ID NO: 14157 - DNA, 25 bp, Artificial Sequence
  Synthetic Oligonucleotide
tgaacagaccattaacctagtttgt

SEQ ID NO: 14158 - DNA, 25 bp, Artificial Sequence
  Synthetic Oligonucleotide
gatcgaataaatctaccctattgtt

SEQ ID NO: 14159 - DNA, 25 bp, Artificial Sequence
  Synthetic Oligonucleotide
agtggttacaatctactctttcttt

SEQ ID NO: 14160 - DNA, 25 bp, Artificial Sequence
  Synthetic Oligonucleotide
gttgaactgatccctataagcttct

SEQ ID NO: 14161 - DNA, 25 bp, Artificial Sequence
  Synthetic Oligonucleotide
gccgaaagtatccctattctcttct

SEQ ID NO: 14162 - DNA, 25 bp, Artificial Sequence
  Synthetic Oligonucleotide
ccgtcatcgccactatctactttat

SEQ ID NO: 14163 - DNA, 25 bp, Artificial Sequence
  Synthetic Oligonucleotide
ccggtgtgcgtccagtaacatcttt

SEQ ID NO: 14164 - DNA, 25 bp, Artificial Sequence
  Synthetic Oligonucleotide
ccagtgagagtttgactctctcttt

SEQ ID NO: 14165 - DNA, 25 bp, Artificial Sequence
  Synthetic Oligonucleotide
ccatcgagtagaattgaactttatt

SEQ ID NO: 14166 - DNA, 25 bp, Artificial Sequence
  Synthetic Oligonucleotide
atatatcgaagtattcgaaccattt

SEQ ID NO: 14167 - DNA, 25 bp, Artificial Sequence
  Synthetic Oligonucleotide
agtagggtttacgtgaaccggtctt

SEQ ID NO: 14168 - DNA, 25 bp, Artificial Sequence
  Synthetic Oligonucleotide
cagcagttctacgatggcaagtcct

SEQ ID NO: 14169 - DNA, 25 bp, Artificial Sequence
  Synthetic Oligonucleotide
aggacttgccatcgtagaactgctg

SEQ ID NO: 14170 - DNA, 25 bp, Artificial Sequence
  Synthetic Oligonucleotide
aacttcagacacataaatcgtcgtt

SEQ ID NO: 14171 - DNA, 25 bp, Artificial Sequence
  Synthetic Oligonucleotide
ccagacttgagaagcacaatggtct

SEQ ID NO: 14172 - DNA, 25 bp, Artificial Sequence
  Synthetic Oligonucleotide
acagtacgaataaccatctaggtct

SEQ ID NO: 14173 - DNA, 25 bp, Artificial Sequence
  Synthetic Oligonucleotide
aacacgagtcaaataccatctaaat

SEQ ID NO: 14174 - DNA, 25 bp, Artificial Sequence
  Synthetic Oligonucleotide
ataactctgacaaggtcattttaat

SEQ ID NO: 14175 - DNA, 25 bp, Artificial Sequence
  Synthetic Oligonucleotide
aagtctgagactagcgatttcaact

SEQ ID NO: 14176 - DNA, 25 bp, Artificial Sequence
  Synthetic Oligonucleotide
gtctggcgcgcgcacttctatatct

SEQ ID NO: 14177 - DNA, 25 bp, Artificial Sequence
  Synthetic Oligonucleotide
gcgtccgcggcgtacgatcgaacct

SEQ ID NO: 14178 - DNA, 25 bp, Artificial Sequence
  Synthetic Oligonucleotide
cggagtcggaggcctcatcgaccct

SEQ ID NO: 14179 - DNA, 25 bp, Artificial Sequence
  Synthetic Oligonucleotide
tggagccggaggctttcacgaccct

SEQ ID NO: 14180 - DNA, 25 bp, Artificial Sequence
  Synthetic Oligonucleotide
gaggcacgggcgattcttgtccagt

SEQ ID NO: 14181 - DNA, 25 bp, Artificial Sequence
  Synthetic Oligonucleotide
gggtccccgacgagcttccacgagt

SEQ ID NO: 14182 - DNA, 25 bp, Artificial Sequence
  Synthetic Oligonucleotide
ggtcatcgtccgacgaatccgaggt

SEQ ID NO: 14183 - DNA, 25 bp, Artificial Sequence
  Synthetic Oligonucleotide
actcctacggtcacgatacccaggt

SEQ ID NO: 14184 - DNA, 25 bp, Artificial Sequence
  Synthetic Oligonucleotide
agccgaggtacgactgaccgcaggt

SEQ ID NO: 14185 - DNA, 25 bp, Artificial Sequence
  Synthetic Oligonucleotide
tcgaaacggacgactgggtatgagt

SEQ ID NO: 14186 - DNA, 25 bp, Artificial Sequence
  Synthetic Oligonucleotide
cacgaccggagatggtcggtattct

SEQ ID NO: 14187 - DNA, 25 bp, Artificial Sequence
  Synthetic Oligonucleotide
gggagaccgggatgagcgtcttcct

SEQ ID NO: 14188 - DNA, 25 bp, Artificial Sequence
  Synthetic Oligonucleotide
cgggtcttagggatggtgtcttcct

SEQ ID NO: 14189 - DNA, 25 bp, Artificial Sequence
  Synthetic Oligonucleotide
gggaggtagcgtgattggtcttcat

SEQ ID NO: 14190 - DNA, 25 bp, Artificial Sequence
  Synthetic Oligonucleotide
cagcagttctacgatggcaagtcct

SEQ ID NO: 14191 - DNA, 25 bp, Artificial Sequence
  Synthetic Oligonucleotide
aggacttgccatcgtagaactgctg

SEQ ID NO: 14192 - DNA, 25 bp, Artificial Sequence
  Synthetic Oligonucleotide
tagtggtaatacgtatgcatgactt

SEQ ID NO: 14193 - DNA, 25 bp, Artificial Sequence
  Synthetic Oligonucleotide
tcttaaagaaatcacttacatgctt

SEQ ID NO: 14194 - DNA, 25 bp, Artificial Sequence
  Synthetic Oligonucleotide
tctaaaaacagttcgatgaaacctt

SEQ ID NO: 14195 - DNA, 25 bp, Artificial Sequence
  Synthetic Oligonucleotide
ttttataagacctagggaacatctt

SEQ ID NO: 14196 - DNA, 25 bp, Artificial Sequence
  Synthetic Oligonucleotide
taaagagaaagtggtcaccacctct

SEQ ID NO: 14197 - DNA, 25 bp, Artificial Sequence
  Synthetic Oligonucleotide
aagtagtaatcgatccactgcctat

SEQ ID NO: 14198 - DNA, 25 bp, Artificial Sequence
  Synthetic Oligonucleotide
ggggagtatctatccatgtcacact

SEQ ID NO: 14199 - DNA, 25 bp, Artificial Sequence
  Synthetic Oligonucleotide
ggtggtacaccatcgaccctaaact

SEQ ID NO: 14200 - DNA, 25 bp, Artificial Sequence
  Synthetic Oligonucleotide
cgatggtacacctacgacccaaact

SEQ ID NO: 14201 - DNA, 25 bp, Artificial Sequence
  Synthetic Oligonucleotide
gtgttcgccaccacgtacaccaaat

SEQ ID NO: 14202 - DNA, 25 bp, Artificial Sequence
  Synthetic Oligonucleotide
gtgttcgccaccacgtacaccaaat

SEQ ID NO: 14203 - DNA, 25 bp, Artificial Sequence
  Synthetic Oligonucleotide
gtgttcgccaccacgtacaccaaat

SEQ ID NO: 14204 - DNA, 25 bp, Artificial Sequence
  Synthetic Oligonucleotide
ggtcgttcacagtctgaagcgaatt

SEQ ID NO: 14205 - DNA, 25 bp, Artificial Sequence
  Synthetic Oligonucleotide
cgtagtccgtagtctaatttaactt

SEQ ID NO: 14206 - DNA, 25 bp, Artificial Sequence
  Synthetic Oligonucleotide
gtttcagaactggttctagacgtat

SEQ ID NO: 14207 - DNA, 25 bp, Artificial Sequence
  Synthetic Oligonucleotide
gtcaagaaacaggtttacgcgtact

SEQ ID NO: 14208 - DNA, 25 bp, Artificial Sequence
  Synthetic Oligonucleotide
atgaaagaaagagctcctcgttact

SEQ ID NO: 14209 - DNA, 25 bp, Artificial Sequence
  Synthetic Oligonucleotide
ttaagcaacagtttggtcctttact

SEQ ID NO: 14210 - DNA, 25 bp, Artificial Sequence
  Synthetic Oligonucleotide
taagatatctagattggtcctttgt

SEQ ID NO: 14211 - DNA, 25 bp, Artificial Sequence
  Synthetic Oligonucleotide
gactcgtcctaaaggtaccgttgtt

SEQ ID NO: 14212 - DNA, 25 bp, Artificial Sequence
  Synthetic Oligonucleotide
cagcagttctacgatggcaagtcct

SEQ ID NO: 14213 - DNA, 25 bp, Artificial Sequence
  Synthetic Oligonucleotide
aggacttgccatcgtagaactgctg

SEQ ID NO: 14214 - DNA, 25 bp, Artificial Sequence
  Synthetic Oligonucleotide
gacatagtagaccaggacatagatt

SEQ ID NO: 14215 - DNA, 25 bp, Artificial Sequence
  Synthetic Oligonucleotide
gaagatgtgccccctagtcgactat

SEQ ID NO: 14216 - DNA, 25 bp, Artificial Sequence
  Synthetic Oligonucleotide
aagtattttgccataggtagtcctt

SEQ ID NO: 14217 - DNA, 25 bp, Artificial Sequence
  Synthetic Oligonucleotide
gatagttatttcacacgctgacatt

SEQ ID NO: 14218 - DNA, 25 bp, Artificial Sequence
  Synthetic Oligonucleotide
cgactagtgttttcccgtgggaaat

SEQ ID NO: 14219 - DNA, 25 bp, Artificial Sequence
  Synthetic Oligonucleotide
tagtacggattatcccttggaccat

SEQ ID NO: 14220 - DNA, 25 bp, Artificial Sequence
  Synthetic Oligonucleotide
agtagtgagcaaggtagctggccat

SEQ ID NO: 14221 - DNA, 25 bp, Artificial Sequence
  Synthetic Oligonucleotide
agtaacacaaagctaactggcactt

SEQ ID NO: 14222 - DNA, 25 bp, Artificial Sequence
  Synthetic Oligonucleotide
tcgacgtaacagagggctatgaatt

SEQ ID NO: 14223 - DNA, 25 bp, Artificial Sequence
  Synthetic Oligonucleotide
tccaaagaggtcggccgtgcagtct

SEQ ID NO: 14224 - DNA, 25 bp, Artificial Sequence
  Synthetic Oligonucleotide
cagagggtccgtgagtcgctgtact

SEQ ID NO: 14225 - DNA, 25 bp, Artificial Sequence
  Synthetic Oligonucleotide
caggacaaggttgcttgtatctgtt

SEQ ID NO: 14226 - DNA, 25 bp, Artificial Sequence
  Synthetic Oligonucleotide
cgaaagtgtacagttgtagtcgttt

SEQ ID NO: 14227 - DNA, 25 bp, Artificial Sequence
  Synthetic Oligonucleotide
aagcacacctaaagactgatctctt

SEQ ID NO: 14228 - DNA, 25 bp, Artificial Sequence
  Synthetic Oligonucleotide
aaagaaataccgattatgacctcat

SEQ ID NO: 14229 - DNA, 25 bp, Artificial Sequence
  Synthetic Oligonucleotide
aacagaatcaagattaacctatagt

SEQ ID NO: 14230 - DNA, 25 bp, Artificial Sequence
  Synthetic Oligonucleotide
tcgaaactgtaaaagttaccacagt

SEQ ID NO: 14231 - DNA, 25 bp, Artificial Sequence
  Synthetic Oligonucleotide
ccggaagtgtaacagctatcacagt

SEQ ID NO: 14232 - DNA, 25 bp, Artificial Sequence
  Synthetic Oligonucleotide
gaggcaagtggttgagtcttcctat

SEQ ID NO: 14233 - DNA, 25 bp, Artificial Sequence
  Synthetic Oligonucleotide
agtgcaggtcggatcagttctgcct

SEQ ID NO: 14234 - DNA, 25 bp, Artificial Sequence
  Synthetic Oligonucleotide
cagcagttctacgatggcaagtcct

SEQ ID NO: 14235 - DNA, 25 bp, Artificial Sequence
  Synthetic Oligonucleotide
aggacttgccatcgtagaactgctg

SEQ ID NO: 14236 - DNA, 25 bp, Artificial Sequence
  Synthetic Oligonucleotide
ggtcgggctgatcacgaatcttcgt

SEQ ID NO: 14237 - DNA, 25 bp, Artificial Sequence
  Synthetic Oligonucleotide
acgtcggtacggggcacatacttct

SEQ ID NO: 14238 - DNA, 25 bp, Artificial Sequence
  Synthetic Oligonucleotide
aacgggtaccgcagaccgctcatct

SEQ ID NO: 14239 - DNA, 25 bp, Artificial Sequence
  Synthetic Oligonucleotide
aggtctgcgtacaaccgcacaccgt

SEQ ID NO: 14240 - DNA, 25 bp, Artificial Sequence
  Synthetic Oligonucleotide
gacggggtctactcaccactcgtgt

SEQ ID NO: 14241 - DNA, 25 bp, Artificial Sequence
  Synthetic Oligonucleotide
gcgacgtggcactggactcctctgt

SEQ ID NO: 14242 - DNA, 25 bp, Artificial Sequence
  Synthetic Oligonucleotide
cagcagttctacgatggcaagtcct

SEQ ID NO: 14243 - DNA, 25 bp, Artificial Sequence
  Synthetic Oligonucleotide
aggacttgccatcgtagaactgctg

SEQ ID NO: 14244 - DNA, 25 bp, Artificial Sequence
  Synthetic Oligonucleotide
agagagagttcactaaaaacagcgt

SEQ ID NO: 14245 - DNA, 25 bp, Artificial Sequence
  Synthetic Oligonucleotide
ttaaagtactcctcaagacacagat

SEQ ID NO: 14246 - DNA, 25 bp, Artificial Sequence
  Synthetic Oligonucleotide
gtatttactgtcatcaaacgacaat

SEQ ID NO: 14247 - DNA, 25 bp, Artificial Sequence
  Synthetic Oligonucleotide
aaattttagtcttttacaacacagt

SEQ ID NO: 14248 - DNA, 25 bp, Artificial Sequence
  Synthetic Oligonucleotide
agatagttatgcacctactaaacat

SEQ ID NO: 14249 - DNA, 25 bp, Artificial Sequence
  Synthetic Oligonucleotide
attttgtccgtacctatagacacat

SEQ ID NO: 14250 - DNA, 25 bp, Artificial Sequence
  Synthetic Oligonucleotide
tcgtcttagtaccaggtatacaaat

SEQ ID NO: 14251 - DNA, 25 bp, Artificial Sequence
  Synthetic Oligonucleotide
cggacgtttgtcaagagtattcaat

SEQ ID NO: 14252 - DNA, 25 bp, Artificial Sequence
  Synthetic Oligonucleotide
ggcgtcgctggcgaagtggtacatt

SEQ ID NO: 14253 - DNA, 25 bp, Artificial Sequence
  Synthetic Oligonucleotide
gtgactcctgttgcaatggtatgtt

SEQ ID NO: 14254 - DNA, 25 bp, Artificial Sequence
  Synthetic Oligonucleotide
tcttcgttgttcaaaaagttcgtct

SEQ ID NO: 14255 - DNA, 25 bp, Artificial Sequence
  Synthetic Oligonucleotide
ggttttgggtgtgtaaggatgtctt

SEQ ID NO: 14256 - DNA, 25 bp, Artificial Sequence
  Synthetic Oligonucleotide
acttttaggtatgttatgaggtcat

SEQ ID NO: 14257 - DNA, 25 bp, Artificial Sequence
  Synthetic Oligonucleotide
gtgtgtaaggatgtctttcgtgctt

SEQ ID NO: 14258 - DNA, 25 bp, Artificial Sequence
  Synthetic Oligonucleotide
tggagcaaccgcatgtcgaggtagt

SEQ ID NO: 14259 - DNA, 25 bp, Artificial Sequence
  Synthetic Oligonucleotide
gtcggtgacatctgaatctgggtat

SEQ ID NO: 14260 - DNA, 25 bp, Artificial Sequence
  Synthetic Oligonucleotide
caacgagtgcatgaaggtcttgggt

SEQ ID NO: 14261 - DNA, 25 bp, Artificial Sequence
  Synthetic Oligonucleotide
ccagtgtgtcatacagagttttgtt

SEQ ID NO: 14262 - DNA, 25 bp, Artificial Sequence
  Synthetic Oligonucleotide
cgcatgttcaggaatgcctatagtt

SEQ ID NO: 14263 - DNA, 25 bp, Artificial Sequence
  Synthetic Oligonucleotide
ggcatattaaggaatgcctgtagct

SEQ ID NO: 14264 - DNA, 25 bp, Artificial Sequence
  Synthetic Oligonucleotide
aatataagacgtaatgcccgtacat

SEQ ID NO: 14265 - DNA, 25 bp, Artificial Sequence
  Synthetic Oligonucleotide
gaactttaacgactcaggctacact

SEQ ID NO: 14266 - DNA, 25 bp, Artificial Sequence
  Synthetic Oligonucleotide
atacttagtagtttctcaggcttct

SEQ ID NO: 14267 - DNA, 25 bp, Artificial Sequence
  Synthetic Oligonucleotide
tacttatatgacatcgagtccgatt

SEQ ID NO: 14268 - DNA, 25 bp, Artificial Sequence
  Synthetic Oligonucleotide
gatttctactgcgtcgagcacgatt

SEQ ID NO: 14269 - DNA, 25 bp, Artificial Sequence
  Synthetic Oligonucleotide
ggaggttctaagtcgtggaacctat

SEQ ID NO: 14270 - DNA, 25 bp, Artificial Sequence
  Synthetic Oligonucleotide
ggggactctgcgtcgtggttcacct

SEQ ID NO: 14271 - DNA, 25 bp, Artificial Sequence
  Synthetic Oligonucleotide
ggtgcgtctgcgttgtggttcactt

SEQ ID NO: 14272 - DNA, 25 bp, Artificial Sequence
  Synthetic Oligonucleotide
ataacgttagacgtgtccgtgtttt

SEQ ID NO: 14273 - DNA, 25 bp, Artificial Sequence
  Synthetic Oligonucleotide
aagatatctagtttggtcctttgtt

SEQ ID NO: 14274 - DNA, 25 bp, Artificial Sequence
  Synthetic Oligonucleotide
aatttgttaccggtaactgtcttct

SEQ ID NO: 14275 - DNA, 25 bp, Artificial Sequence
  Synthetic Oligonucleotide
tctacgtactacgggaagtctcatt

SEQ ID NO: 14276 - DNA, 25 bp, Artificial Sequence
  Synthetic Oligonucleotide
tcgacgcagtagaaatcgtcggact

SEQ ID NO: 14277 - DNA, 25 bp, Artificial Sequence
  Synthetic Oligonucleotide
agagcgcagagaacagtcgtgaagt

SEQ ID NO: 14278 - DNA, 25 bp, Artificial Sequence
  Synthetic Oligonucleotide
aaaccagacgcgttagtcgaggagt

SEQ ID NO: 14279 - DNA, 25 bp, Artificial Sequence
  Synthetic Oligonucleotide
tacatcagtacgcatacgcgaagat

SEQ ID NO: 14280 - DNA, 25 bp, Artificial Sequence
  Synthetic Oligonucleotide
tgcactaccagtgggcgacaaacgt

SEQ ID NO: 14281 - DNA, 25 bp, Artificial Sequence
  Synthetic Oligonucleotide
accgacagcagtcgagcacaacact

SEQ ID NO: 14282 - DNA, 25 bp, Artificial Sequence
  Synthetic Oligonucleotide
tcgaaccgagaccagcggtaccact

SEQ ID NO: 14283 - DNA, 25 bp, Artificial Sequence
  Synthetic Oligonucleotide
catcacacacacgacagggtaccct

SEQ ID NO: 14284 - DNA, 25 bp, Artificial Sequence
  Synthetic Oligonucleotide
cttctaaacgtaaggaggagcctct

SEQ ID NO: 14285 - DNA, 25 bp, Artificial Sequence
  Synthetic Oligonucleotide
cggtttaagtaacagtatggtcctt

SEQ ID NO: 14286 - DNA, 25 bp, Artificial Sequence
  Synthetic Oligonucleotide
ttgttaagaccgagtatcctcctct

SEQ ID NO: 14287 - DNA, 25 bp, Artificial Sequence
  Synthetic Oligonucleotide
tctcatgaacgcgagtcctcctcgt

SEQ ID NO: 14288 - DNA, 25 bp, Artificial Sequence
  Synthetic Oligonucleotide
tctcatgaacgcgagtcctcctcgt

SEQ ID NO: 14289 - DNA, 25 bp, Artificial Sequence
  Synthetic Oligonucleotide
ggtcccggaacgcgaacgatccgtt

SEQ ID NO: 14290 - DNA, 25 bp, Artificial Sequence
  Synthetic Oligonucleotide
gcaggagctcgacgaacggtcgctt

SEQ ID NO: 14291 - DNA, 25 bp, Artificial Sequence
  Synthetic Oligonucleotide
gcaggagctcgacgaacggtcgttt

SEQ ID NO: 14292 - DNA, 25 bp, Artificial Sequence
  Synthetic Oligonucleotide
taggtagatataacacacctcgttt

SEQ ID NO: 14293 - DNA, 25 bp, Artificial Sequence
  Synthetic Oligonucleotide
tggaactactgtacacacctgtact

SEQ ID NO: 14294 - DNA, 25 bp, Artificial Sequence
  Synthetic Oligonucleotide
cagaaggaacagttacagaactgtt

SEQ ID NO: 14295 - DNA, 25 bp, Artificial Sequence
  Synthetic Oligonucleotide
gagaagtagaaccaaaacggtgtct

SEQ ID NO: 14296 - DNA, 25 bp, Artificial Sequence
  Synthetic Oligonucleotide
gactagtgttaaacgagaaaccttt

SEQ ID NO: 14297 - DNA, 25 bp, Artificial Sequence
  Synthetic Oligonucleotide
tagaagttcagacggtaaacacttt

SEQ ID NO: 14298 - DNA, 25 bp, Artificial Sequence
  Synthetic Oligonucleotide
gctgaaagcaagaactaattacttt

SEQ ID NO: 14299 - DNA, 25 bp, Artificial Sequence
  Synthetic Oligonucleotide
cccgaaaacacgagtcaattaccat

SEQ ID NO: 14300 - DNA, 25 bp, Artificial Sequence
  Synthetic Oligonucleotide
gagaacagtcagagccacataccct

SEQ ID NO: 14301 - DNA, 25 bp, Artificial Sequence
  Synthetic Oligonucleotide
gaaacagacgttacccacacaagct

SEQ ID NO: 14302 - DNA, 25 bp, Artificial Sequence
  Synthetic Oligonucleotide
taacgcgttagcgcacacttacact

SEQ ID NO: 14303 - DNA, 25 bp, Artificial Sequence
  Synthetic Oligonucleotide
agtacgcggagcacgtccctcgact

SEQ ID NO: 14304 - DNA, 25 bp, Artificial Sequence
  Synthetic Oligonucleotide
atacgcggtaacatcgtgcacacat

SEQ ID NO: 14305 - DNA, 25 bp, Artificial Sequence
  Synthetic Oligonucleotide
agtgcgagcgtcagttcgaccgaat

SEQ ID NO: 14306 - DNA, 25 bp, Artificial Sequence
  Synthetic Oligonucleotide
tcacgttaccgtattcggtcgaact

SEQ ID NO: 14307 - DNA, 25 bp, Artificial Sequence
  Synthetic Oligonucleotide
gtttcacgaccctaatgtccgcact

SEQ ID NO: 14308 - DNA, 25 bp, Artificial Sequence
  Synthetic Oligonucleotide
ggcgtaacagcctcatgacgccgct

SEQ ID NO: 14309 - DNA, 25 bp, Artificial Sequence
  Synthetic Oligonucleotide
agcgtaaacggcaacggccgccgct

SEQ ID NO: 14310 - DNA, 25 bp, Artificial Sequence
  Synthetic Oligonucleotide
aacgcgaagaactactgccgccgct

SEQ ID NO: 14311 - DNA, 25 bp, Artificial Sequence
  Synthetic Oligonucleotide
tcgtgaacgaaaatgccgtagccgt

SEQ ID NO: 14312 - DNA, 25 bp, Artificial Sequence
  Synthetic Oligonucleotide
ctagaactagaagtaccacgatcct

SEQ ID NO: 14313 - DNA, 25 bp, Artificial Sequence
  Synthetic Oligonucleotide
ctgaagtgtgacaaccagtagtatt

SEQ ID NO: 14314 - DNA, 25 bp, Artificial Sequence
  Synthetic Oligonucleotide
cgcaagttagactcggtactagttt

SEQ ID NO: 14315 - DNA, 25 bp, Artificial Sequence
  Synthetic Oligonucleotide
cgggataactctgacatggtcattt

SEQ ID NO: 14316 - DNA, 25 bp, Artificial Sequence
  Synthetic Oligonucleotide
agggaaacctcttctgtccctactt

SEQ ID NO: 14317 - DNA, 25 bp, Artificial Sequence
  Synthetic Oligonucleotide
ggtgaaaaatcttcgtactcctctt

SEQ ID NO: 14318 - DNA, 25 bp, Artificial Sequence
  Synthetic Oligonucleotide
ggttctcagaaagttctactccttt

SEQ ID NO: 14319 - DNA, 25 bp, Artificial Sequence
  Synthetic Oligonucleotide
ctttcgaaaatttacgtttctactt

SEQ ID NO: 14320 - DNA, 25 bp, Artificial Sequence
  Synthetic Oligonucleotide
aataataagttgtcgtgttcctact

SEQ ID NO: 14321 - DNA, 25 bp, Artificial Sequence
  Synthetic Oligonucleotide
ataatccgttgggactactgactct

SEQ ID NO: 14322 - DNA, 25 bp, Artificial Sequence
  Synthetic Oligonucleotide
ccaaaaagtagtggcacttcgactt

SEQ ID NO: 14323 - DNA, 25 bp, Artificial Sequence
  Synthetic Oligonucleotide
aaaccgagagattatgcgtactact

SEQ ID NO: 14324 - DNA, 25 bp, Artificial Sequence
  Synthetic Oligonucleotide
aaatactagtaggttttcgacgact

SEQ ID NO: 14325 - DNA, 25 bp, Artificial Sequence
  Synthetic Oligonucleotide
acaagtagagcggtctgaaacgact

SEQ ID NO: 14326 - DNA, 25 bp, Artificial Sequence
  Synthetic Oligonucleotide
aggagtcgctcgacttagtaacgct

SEQ ID NO: 14327 - DNA, 25 bp, Artificial Sequence
  Synthetic Oligonucleotide
gtaggacgccgtcgtactggtaatt

SEQ ID NO: 14328 - DNA, 25 bp, Artificial Sequence
  Synthetic Oligonucleotide
ggtacaaccggtccgaccagaactt

SEQ ID NO: 14329 - DNA, 25 bp, Artificial Sequence
  Synthetic Oligonucleotide
tggtacaaccggtccgaccagaact

SEQ ID NO: 14330 - DNA, 25 bp, Artificial Sequence
  Synthetic Oligonucleotide
gtacaacaggtctgcgaccaatcgt

SEQ ID NO: 14331 - DNA, 25 bp, Artificial Sequence
  Synthetic Oligonucleotide
cactcatcagtgtcggtccgtaatt

SEQ ID NO: 14332 - DNA, 25 bp, Artificial Sequence
  Synthetic Oligonucleotide
tagtgatgacggctaggtatgattt

SEQ ID NO: 14333 - DNA, 25 bp, Artificial Sequence
  Synthetic Oligonucleotide
cgagaatgagtttaggtaggcttct

SEQ ID NO: 14334 - DNA, 25 bp, Artificial Sequence
  Synthetic Oligonucleotide
cgagcatcgagaagaggtccctcct

SEQ ID NO: 14335 - DNA, 25 bp, Artificial Sequence
  Synthetic Oligonucleotide
cgagcatcgagaagaggtccctcct

SEQ ID NO: 14336 - DNA, 25 bp, Artificial Sequence
  Synthetic Oligonucleotide
tgagcatcgagaagaggtccctcct

SEQ ID NO: 14337 - DNA, 25 bp, Artificial Sequence
  Synthetic Oligonucleotide
taacatacgtcacggtgcctttcgt

SEQ ID NO: 14338 - DNA, 25 bp, Artificial Sequence
  Synthetic Oligonucleotide
tacctatagacacatttactttcgt

SEQ ID NO: 14339 - DNA, 25 bp, Artificial Sequence
  Synthetic Oligonucleotide
ggacacatcgccactttacgcatct

SEQ ID NO: 14340 - DNA, 25 bp, Artificial Sequence
  Synthetic Oligonucleotide
cgaaaacacgagtcaattaccatct

SEQ ID NO: 14341 - DNA, 25 bp, Artificial Sequence
  Synthetic Oligonucleotide
ttgagaaaagggttcatcaccagtt

SEQ ID NO: 14342 - DNA, 25 bp, Artificial Sequence
  Synthetic Oligonucleotide
agaaagaagagcataaactcacgtt

SEQ ID NO: 14343 - DNA, 25 bp, Artificial Sequence
  Synthetic Oligonucleotide
gtatgaacagaccataaacctagtt

SEQ ID NO: 14344 - DNA, 25 bp, Artificial Sequence
  Synthetic Oligonucleotide
gtactatggaaccacagaaccagat

SEQ ID NO: 14345 - DNA, 25 bp, Artificial Sequence
  Synthetic Oligonucleotide
ccgttatggacccttgtaccaccat

SEQ ID NO: 14346 - DNA, 25 bp, Artificial Sequence
  Synthetic Oligonucleotide
ccatatatcgaagttttcgaaccat

SEQ ID NO: 14347 - DNA, 25 bp, Artificial Sequence
  Synthetic Oligonucleotide
aactatacgaattcaagtcgcccat

SEQ ID NO: 14348 - DNA, 25 bp, Artificial Sequence
  Synthetic Oligonucleotide
agttcagtcatctacgtctccgctt

SEQ ID NO: 14349 - DNA, 25 bp, Artificial Sequence
  Synthetic Oligonucleotide
cagttaagaatagtcttcgtcatat

SEQ ID NO: 14350 - DNA, 25 bp, Artificial Sequence
  Synthetic Oligonucleotide
tctaagactactgtcactgttaact

SEQ ID NO: 14351 - DNA, 25 bp, Artificial Sequence
  Synthetic Oligonucleotide
cctaaacgatcggtcgtttctaact

SEQ ID NO: 14352 - DNA, 25 bp, Artificial Sequence
  Synthetic Oligonucleotide
gacgaatcgaaggctctagtctgct

SEQ ID NO: 14353 - DNA, 25 bp, Artificial Sequence
  Synthetic Oligonucleotide
tagcgataaaaggtactcacttgct

SEQ ID NO: 14354 - DNA, 25 bp, Artificial Sequence
  Synthetic Oligonucleotide
aggtgtcagaagactcaccgtcact

SEQ ID NO: 14355 - DNA, 25 bp, Artificial Sequence
  Synthetic Oligonucleotide
gtggtgaagcaactacacctactat

SEQ ID NO: 14356 - DNA, 25 bp, Artificial Sequence
  Synthetic Oligonucleotide
agtcggagggctcatcgaccctaat

SEQ ID NO: 14357 - DNA, 25 bp, Artificial Sequence
  Synthetic Oligonucleotide
agccggagggtttcacgaccctaat

SEQ ID NO: 14358 - DNA, 25 bp, Artificial Sequence
  Synthetic Oligonucleotide
tgtggtagaggtctcagctcctgct

SEQ ID NO: 14359 - DNA, 25 bp, Artificial Sequence
  Synthetic Oligonucleotide
tgtcgccgattcacagttctcggct

SEQ ID NO: 14360 - DNA, 25 bp, Artificial Sequence
  Synthetic Oligonucleotide
tcgccgattcacagttctcggctct

SEQ ID NO: 14361 - DNA, 25 bp, Artificial Sequence
  Synthetic Oligonucleotide
gtacgactacatcttgtttgttatt

SEQ ID NO: 14362 - DNA, 25 bp, Artificial Sequence
  Synthetic Oligonucleotide
gaggcgaagtaacttattcatttct

SEQ ID NO: 14363 - DNA, 25 bp, Artificial Sequence
  Synthetic Oligonucleotide
agggaaacgaaacgtggtcattctt

SEQ ID NO: 14364 - DNA, 25 bp, Artificial Sequence
  Synthetic Oligonucleotide
gaggaacaggaccttgttgaccctt

SEQ ID NO: 14365 - DNA, 25 bp, Artificial Sequence
  Synthetic Oligonucleotide
cgtaagaaagccgttatggaccctt

SEQ ID NO: 14366 - DNA, 25 bp, Artificial Sequence
  Synthetic Oligonucleotide
taagaaagccgttatggacccttgt

SEQ ID NO: 14367 - DNA, 25 bp, Artificial Sequence
  Synthetic Oligonucleotide
gggaaggcgtacttggccctctcgt

SEQ ID NO: 14368 - DNA, 25 bp, Artificial Sequence
  Synthetic Oligonucleotide
aggacttgccatcgtagaactgctg

SEQ ID NO: 14369 - DNA, 25 bp, Artificial Sequence
  Synthetic Oligonucleotide
cagcagttctacgatggcaagtcct

SEQ ID NO: 14370 - DNA, 25 bp, Artificial Sequence
  Synthetic Oligonucleotide
agagagagttcagtaaaaacagcgt

SEQ ID NO: 14371 - DNA, 25 bp, Artificial Sequence
  Synthetic Oligonucleotide
ttaaagtactccacaagacacagat

SEQ ID NO: 14372 - DNA, 25 bp, Artificial Sequence
  Synthetic Oligonucleotide
gtatttactgtcttcaaacgacaat

SEQ ID NO: 14373 - DNA, 25 bp, Artificial Sequence
  Synthetic Oligonucleotide
aaattttagtctattacaacacagt

SEQ ID NO: 14374 - DNA, 25 bp, Artificial Sequence
  Synthetic Oligonucleotide
agatagttatgctcctactaaacat

SEQ ID NO: 14375 - DNA, 25 bp, Artificial Sequence
  Synthetic Oligonucleotide
attttgtccgtagctatagacacat

SEQ ID NO: 14376 - DNA, 25 bp, Artificial Sequence
  Synthetic Oligonucleotide
tcgtcttagtacgaggtatacaaat

SEQ ID NO: 14377 - DNA, 25 bp, Artificial Sequence
  Synthetic Oligonucleotide
cggacgtttgtctagagtattcaat

SEQ ID NO: 14378 - DNA, 25 bp, Artificial Sequence
  Synthetic Oligonucleotide
ggcgtcgctggccaagtggtacatt

SEQ ID NO: 14379 - DNA, 25 bp, Artificial Sequence
  Synthetic Oligonucleotide
gtgactcctgttccaatggtatgtt

SEQ ID NO: 14380 - DNA, 25 bp, Artificial Sequence
  Synthetic Oligonucleotide
tcttcgttgttctaaaagttcgtct

SEQ ID NO: 14381 - DNA, 25 bp, Artificial Sequence
  Synthetic Oligonucleotide
ggttttgggtgtctaaggatgtctt

SEQ ID NO: 14382 - DNA, 25 bp, Artificial Sequence
  Synthetic Oligonucleotide
acttttaggtatcttatgaggtcat

SEQ ID NO: 14383 - DNA, 25 bp, Artificial Sequence
  Synthetic Oligonucleotide
gtgtgtaaggatctctttcgtgctt

SEQ ID NO: 14384 - DNA, 25 bp, Artificial Sequence
  Synthetic Oligonucleotide
tggagcaaccgcttgtcgaggtagt

SEQ ID NO: 14385 - DNA, 25 bp, Artificial Sequence
  Synthetic Oligonucleotide
gtcggtgacatcagaatctgggtat

SEQ ID NO: 14386 - DNA, 25 bp, Artificial Sequence
  Synthetic Oligonucleotide
caacgagtgcatcaaggtcttgggt

SEQ ID NO: 14387 - DNA, 25 bp, Artificial Sequence
  Synthetic Oligonucleotide
ccagtgtgtcattcagagttttgtt

SEQ ID NO: 14388 - DNA, 25 bp, Artificial Sequence
  Synthetic Oligonucleotide
cgcatgttcaggtatgcctatagtt

SEQ ID NO: 14389 - DNA, 25 bp, Artificial Sequence
  Synthetic Oligonucleotide
ggcatattaaggtatgcctgtagct

SEQ ID NO: 14390 - DNA, 25 bp, Artificial Sequence
  Synthetic Oligonucleotide
aatataagacgttatgcccgtacat

SEQ ID NO: 14391 - DNA, 25 bp, Artificial Sequence
  Synthetic Oligonucleotide
gaactttaacgagtcaggctacact

SEQ ID NO: 14392 - DNA, 25 bp, Artificial Sequence
  Synthetic Oligonucleotide
atacttagtagtatctcaggcttct

SEQ ID NO: 14393 - DNA, 25 bp, Artificial Sequence
  Synthetic Oligonucleotide
tacttatatgacttcgagtccgatt

SEQ ID NO: 14394 - DNA, 25 bp, Artificial Sequence
  Synthetic Oligonucleotide
gatttctactgcctcgagcacgatt

SEQ ID NO: 14395 - DNA, 25 bp, Artificial Sequence
  Synthetic Oligonucleotide
ggaggttctaagacgtggaacctat

SEQ ID NO: 14396 - DNA, 25 bp, Artificial Sequence
  Synthetic Oligonucleotide
ggggactctgcgacgtggttcacct

SEQ ID NO: 14397 - DNA, 25 bp, Artificial Sequence
  Synthetic Oligonucleotide
ggtgcgtctgcgatgtggttcactt

SEQ ID NO: 14398 - DNA, 25 bp, Artificial Sequence
  Synthetic Oligonucleotide
ataacgttagacctgtccgtgtttt

SEQ ID NO: 14399 - DNA, 25 bp, Artificial Sequence
  Synthetic Oligonucleotide
aagatatctagtatggtcctttgtt

SEQ ID NO: 14400 - DNA, 25 bp, Artificial Sequence
  Synthetic Oligonucleotide
aatttgttaccgctaactgtcttct

SEQ ID NO: 14401 - DNA, 25 bp, Artificial Sequence
  Synthetic Oligonucleotide
tctacgtactaccggaagtctcatt

SEQ ID NO: 14402 - DNA, 25 bp, Artificial Sequence
  Synthetic Oligonucleotide
tcgacgcagtagtaatcgtcggact

SEQ ID NO: 14403 - DNA, 25 bp, Artificial Sequence
  Synthetic Oligonucleotide
agagcgcagagatcagtcgtgaagt

SEQ ID NO: 14404 - DNA, 25 bp, Artificial Sequence
  Synthetic Oligonucleotide
aaaccagacgcgatagtcgaggagt

SEQ ID NO: 14405 - DNA, 25 bp, Artificial Sequence
  Synthetic Oligonucleotide
tacatcagtacggatacgcgaagat

SEQ ID NO: 14406 - DNA, 25 bp, Artificial Sequence
  Synthetic Oligonucleotide
tgcactaccagtcggcgacaaacgt

SEQ ID NO: 14407 - DNA, 25 bp, Artificial Sequence
  Synthetic Oligonucleotide
accgacagcagtggagcacaacact

SEQ ID NO: 14408 - DNA, 25 bp, Artificial Sequence
  Synthetic Oligonucleotide
tcgaaccgagacgagcggtaccact

SEQ ID NO: 14409 - DNA, 25 bp, Artificial Sequence
  Synthetic Oligonucleotide
catcacacacaccacagggtaccct

SEQ ID NO: 14410 - DNA, 25 bp, Artificial Sequence
  Synthetic Oligonucleotide
cttctaaacgtatggaggagcctct

SEQ ID NO: 14411 - DNA, 25 bp, Artificial Sequence
  Synthetic Oligonucleotide
cggtttaagtaagagtatggtcctt

SEQ ID NO: 14412 - DNA, 25 bp, Artificial Sequence
  Synthetic Oligonucleotide
ttgttaagaccgtgtatcctcctct

SEQ ID NO: 14413 - DNA, 25 bp, Artificial Sequence
  Synthetic Oligonucleotide
tctcatgaacgccagtcctcctcgt

SEQ ID NO: 14414 - DNA, 25 bp, Artificial Sequence
  Synthetic Oligonucleotide
tctcatgaacgccagtcctcctcgt

SEQ ID NO: 14415 - DNA, 25 bp, Artificial Sequence
  Synthetic Oligonucleotide
ggtcccggaacgggaacgatccgtt

SEQ ID NO: 14416 - DNA, 25 bp, Artificial Sequence
  Synthetic Oligonucleotide
gcaggagctcgaggaacggtcgctt

SEQ ID NO: 14417 - DNA, 25 bp, Artificial Sequence
  Synthetic Oligonucleotide
gcaggagctcgaggaacggtcgttt

SEQ ID NO: 14418 - DNA, 25 bp, Artificial Sequence
  Synthetic Oligonucleotide
taggtagatatatcacacctcgttt

SEQ ID NO: 14419 - DNA, 25 bp, Artificial Sequence
  Synthetic Oligonucleotide
tggaactactgttcacacctgtact

SEQ ID NO: 14420 - DNA, 25 bp, Artificial Sequence
  Synthetic Oligonucleotide
cagaaggaacagatacagaactgtt

SEQ ID NO: 14421 - DNA, 25 bp, Artificial Sequence
  Synthetic Oligonucleotide
gagaagtagaacgaaaacggtgtct

SEQ ID NO: 14422 - DNA, 25 bp, Artificial Sequence
  Synthetic Oligonucleotide
gactagtgttaatcgagaaaccttt

SEQ ID NO: 14423 - DNA, 25 bp, Artificial Sequence
  Synthetic Oligonucleotide
tagaagttcagagggtaaacacttt

SEQ ID NO: 14424 - DNA, 25 bp, Artificial Sequence
  Synthetic Oligonucleotide
gctgaaagcaagtactaattacttt

SEQ ID NO: 14425 - DNA, 25 bp, Artificial Sequence
  Synthetic Oligonucleotide
cccgaaaacacgtgtcaattaccat

SEQ ID NO: 14426 - DNA, 25 bp, Artificial Sequence
  Synthetic Oligonucleotide
gagaacagtcagtgccacataccct

SEQ ID NO: 14427 - DNA, 25 bp, Artificial Sequence
  Synthetic Oligonucleotide
gaaacagacgtttcccacacaagct

SEQ ID NO: 14428 - DNA, 25 bp, Artificial Sequence
  Synthetic Oligonucleotide
taacgcgttagcccacacttacact

SEQ ID NO: 14429 - DNA, 25 bp, Artificial Sequence
  Synthetic Oligonucleotide
agtacgcggagctcgtccctcgact

SEQ ID NO: 14430 - DNA, 25 bp, Artificial Sequence
  Synthetic Oligonucleotide
atacgcggtaacttcgtgcacacat

SEQ ID NO: 14431 - DNA, 25 bp, Artificial Sequence
  Synthetic Oligonucleotide
agtgcgagcgtctgttcgaccgaat

SEQ ID NO: 14432 - DNA, 25 bp, Artificial Sequence
  Synthetic Oligonucleotide
tcacgttaccgttttcggtcgaact

SEQ ID NO: 14433 - DNA, 25 bp, Artificial Sequence
  Synthetic Oligonucleotide
gtttcacgacccaaatgtccgcact

SEQ ID NO: 14434 - DNA, 25 bp, Artificial Sequence
  Synthetic Oligonucleotide
ggcgtaacagccacatgacgccgct

SEQ ID NO: 14435 - DNA, 25 bp, Artificial Sequence
  Synthetic Oligonucleotide
agcgtaaacggctacggccgccgct

SEQ ID NO: 14436 - DNA, 25 bp, Artificial Sequence
  Synthetic Oligonucleotide
aacgcgaagaacaactgccgccgct

SEQ ID NO: 14437 - DNA, 25 bp, Artificial Sequence
  Synthetic Oligonucleotide
tcgtgaacgaaattgccgtagccgt

SEQ ID NO: 14438 - DNA, 25 bp, Artificial Sequence
  Synthetic Oligonucleotide
ctagaactagaactaccacgatcct

SEQ ID NO: 14439 - DNA, 25 bp, Artificial Sequence
  Synthetic Oligonucleotide
ctgaagtgtgactaccagtagtatt

SEQ ID NO: 14440 - DNA, 25 bp, Artificial Sequence
  Synthetic Oligonucleotide
cgcaagttagacacggtactagttt

SEQ ID NO: 14441 - DNA, 25 bp, Artificial Sequence
  Synthetic Oligonucleotide
cgggataactctcacatggtcattt

SEQ ID NO: 14442 - DNA, 25 bp, Artificial Sequence
  Synthetic Oligonucleotide
agggaaacctctactgtccctactt

SEQ ID NO: 14443 - DNA, 25 bp, Artificial Sequence
  Synthetic Oligonucleotide
ggtgaaaaatctacgtactcctctt

SEQ ID NO: 14444 - DNA, 25 bp, Artificial Sequence
  Synthetic Oligonucleotide
ggttctcagaaacttctactccttt

SEQ ID NO: 14445 - DNA, 25 bp, Artificial Sequence
  Synthetic Oligonucleotide
ctttcgaaaattaacgtttctactt

SEQ ID NO: 14446 - DNA, 25 bp, Artificial Sequence
  Synthetic Oligonucleotide
aataataagttgacgtgttcctact

SEQ ID NO: 14447 - DNA, 25 bp, Artificial Sequence
  Synthetic Oligonucleotide
ataatccgttggcactactgactct

SEQ ID NO: 14448 - DNA, 25 bp, Artificial Sequence
  Synthetic Oligonucleotide
ccaaaaagtagtcgcacttcgactt

SEQ ID NO: 14449 - DNA, 25 bp, Artificial Sequence
  Synthetic Oligonucleotide
aaaccgagagataatgcgtactact

SEQ ID NO: 14450 - DNA, 25 bp, Artificial Sequence
  Synthetic Oligonucleotide
aaatactagtagcttttcgacgact

SEQ ID NO: 14451 - DNA, 25 bp, Artificial Sequence
  Synthetic Oligonucleotide
acaagtagagcgctctgaaacgact

SEQ ID NO: 14452 - DNA, 25 bp, Artificial Sequence
  Synthetic Oligonucleotide
aggagtcgctcgtcttagtaacgct

SEQ ID NO: 14453 - DNA, 25 bp, Artificial Sequence
  Synthetic Oligonucleotide
gtaggacgccgtggtactggtaatt

SEQ ID NO: 14454 - DNA, 25 bp, Artificial Sequence
  Synthetic Oligonucleotide
ggtacaaccggtgcgaccagaactt

SEQ ID NO: 14455 - DNA, 25 bp, Artificial Sequence
  Synthetic Oligonucleotide
tggtacaaccggaccgaccagaact

SEQ ID NO: 14456 - DNA, 25 bp, Artificial Sequence
  Synthetic Oligonucleotide
gtacaacaggtcagcgaccaatcgt

SEQ ID NO: 14457 - DNA, 25 bp, Artificial Sequence
  Synthetic Oligonucleotide
cactcatcagtgacggtccgtaatt

SEQ ID NO: 14458 - DNA, 25 bp, Artificial Sequence
  Synthetic Oligonucleotide
tagtgatgacgggtaggtatgattt

SEQ ID NO: 14459 - DNA, 25 bp, Artificial Sequence
  Synthetic Oligonucleotide
cgagaatgagttaaggtaggcttct

SEQ ID NO: 14460 - DNA, 25 bp, Artificial Sequence
  Synthetic Oligonucleotide
cgagcatcgagatgaggtccctcct

SEQ ID NO: 14461 - DNA, 25 bp, Artificial Sequence
  Synthetic Oligonucleotide
cgagcatcgagatgaggtccctcct

SEQ ID NO: 14462 - DNA, 25 bp, Artificial Sequence
  Synthetic Oligonucleotide
tgagcatcgagatgaggtccctcct

SEQ ID NO: 14463 - DNA, 25 bp, Artificial Sequence
  Synthetic Oligonucleotide
taacatacgtcagggtgcctttcgt

SEQ ID NO: 14464 - DNA, 25 bp, Artificial Sequence
  Synthetic Oligonucleotide
tacctatagacagatttactttcgt

SEQ ID NO: 14465 - DNA, 25 bp, Artificial Sequence
  Synthetic Oligonucleotide
ggacacatcgcctctttacgcatct

SEQ ID NO: 14466 - DNA, 25 bp, Artificial Sequence
  Synthetic Oligonucleotide
cgaaaacacgagacaattaccatct

SEQ ID NO: 14467 - DNA, 25 bp, Artificial Sequence
  Synthetic Oligonucleotide
ttgagaaaagggatcatcaccagtt

SEQ ID NO: 14468 - DNA, 25 bp, Artificial Sequence
  Synthetic Oligonucleotide
agaaagaagagcttaaactcacgtt

SEQ ID NO: 14469 - DNA, 25 bp, Artificial Sequence
  Synthetic Oligonucleotide
gtatgaacagacgataaacctagtt

SEQ ID NO: 14470 - DNA, 25 bp, Artificial Sequence
  Synthetic Oligonucleotide
gtactatggaacgacagaaccagat

SEQ ID NO: 14471 - DNA, 25 bp, Artificial Sequence
  Synthetic Oligonucleotide
ccgttatggaccgttgtaccaccat

SEQ ID NO: 14472 - DNA, 25 bp, Artificial Sequence
  Synthetic Oligonucleotide
ccatatatcgaacttttcgaaccat

SEQ ID NO: 14473 - DNA, 25 bp, Artificial Sequence
  Synthetic Oligonucleotide
aactatacgaatacaagtcgcccat

SEQ ID NO: 14474 - DNA, 25 bp, Artificial Sequence
  Synthetic Oligonucleotide
agttcagtcatcaacgtctccgctt

SEQ ID NO: 14475 - DNA, 25 bp, Artificial Sequence
  Synthetic Oligonucleotide
cagttaagaatactcttcgtcatat

SEQ ID NO: 14476 - DNA, 25 bp, Artificial Sequence
  Synthetic Oligonucleotide
tctaagactactctcactgttaact

SEQ ID NO: 14477 - DNA, 25 bp, Artificial Sequence
  Synthetic Oligonucleotide
cctaaacgatcgctcgtttctaact

SEQ ID NO: 14478 - DNA, 25 bp, Artificial Sequence
  Synthetic Oligonucleotide
gacgaatcgaagcctctagtctgct

SEQ ID NO: 14479 - DNA, 25 bp, Artificial Sequence
  Synthetic Oligonucleotide
tagcgataaaagctactcacttgct

SEQ ID NO: 14480 - DNA, 25 bp, Artificial Sequence
  Synthetic Oligonucleotide
aggtgtcagaagtctcaccgtcact

SEQ ID NO: 14481 - DNA, 25 bp, Artificial Sequence
  Synthetic Oligonucleotide
gtggtgaagcaagtacacctactat

SEQ ID NO: 14482 - DNA, 25 bp, Artificial Sequence
  Synthetic Oligonucleotide
agtcggagggctgatcgaccctaat

SEQ ID NO: 14483 - DNA, 25 bp, Artificial Sequence
  Synthetic Oligonucleotide
agccggagggttacacgaccctaat

SEQ ID NO: 14484 - DNA, 25 bp, Artificial Sequence
  Synthetic Oligonucleotide
tgtggtagaggtgtcagctcctgct

SEQ ID NO: 14485 - DNA, 25 bp, Artificial Sequence
  Synthetic Oligonucleotide
tgtcgccgattctcagttctcggct

SEQ ID NO: 14486 - DNA, 25 bp, Artificial Sequence
  Synthetic Oligonucleotide
tcgccgattcactgttctcggctct

SEQ ID NO: 14487 - DNA, 25 bp, Artificial Sequence
  Synthetic Oligonucleotide
gtacgactacatgttgtttgttatt

SEQ ID NO: 14488 - DNA, 25 bp, Artificial Sequence
  Synthetic Oligonucleotide
gaggcgaagtaagttattcatttct

SEQ ID NO: 14489 - DNA, 25 bp, Artificial Sequence
  Synthetic Oligonucleotide
agggaaacgaaaggtggtcattctt

SEQ ID NO: 14490 - DNA, 25 bp, Artificial Sequence
  Synthetic Oligonucleotide
gaggaacaggacgttgttgaccctt

SEQ ID NO: 14491 - DNA, 25 bp, Artificial Sequence
  Synthetic Oligonucleotide
cgtaagaaagcccttatggaccctt

SEQ ID NO: 14492 - DNA, 25 bp, Artificial Sequence
  Synthetic Oligonucleotide
taagaaagccgtaatggacccttgt

SEQ ID NO: 14493 - DNA, 25 bp, Artificial Sequence
  Synthetic Oligonucleotide
gggaaggcgtacatggccctctcgt

SEQ ID NO: 14494 - DNA, 25 bp, Artificial Sequence
  Synthetic Oligonucleotide
cagcagttctacgatggcaagtcct

SEQ ID NO: 14495 - DNA, 25 bp, Artificial Sequence
  Synthetic Oligonucleotide
gatacgtcaactacttctacagttt

SEQ ID NO: 14496 - DNA, 25 bp, Artificial Sequence
  Synthetic Oligonucleotide
agtcgtcgaaaacctactagtattt

SEQ ID NO: 14497 - DNA, 25 bp, Artificial Sequence
  Synthetic Oligonucleotide
tctagtctgaccgaactgagtattt

SEQ ID NO: 14498 - DNA, 25 bp, Artificial Sequence
  Synthetic Oligonucleotide
gttgacttcgtctaacgaatgtatt

SEQ ID NO: 14499 - DNA, 25 bp, Artificial Sequence
  Synthetic Oligonucleotide
gttctaagtcgtggaacctatgttt

SEQ ID NO: 14500 - DNA, 25 bp, Artificial Sequence
  Synthetic Oligonucleotide
gtcccagtgtgtcatacagagtttt

SEQ ID NO: 14501 - DNA, 25 bp, Artificial Sequence
  Synthetic Oligonucleotide
gctacctgtgagtagtaccatcttt

SEQ ID NO: 14502 - DNA, 25 bp, Artificial Sequence
  Synthetic Oligonucleotide
ctaccgtacttgtcaacagtagttt

SEQ ID NO: 14503 - DNA, 25 bp, Artificial Sequence
  Synthetic Oligonucleotide
attttagtcttttacaacacagttt

SEQ ID NO: 14504 - DNA, 25 bp, Artificial Sequence
  Synthetic Oligonucleotide
cggttacagttttgtacttgcattt

SEQ ID NO: 14505 - DNA, 25 bp, Artificial Sequence
  Synthetic Oligonucleotide
tcgcaagtctcagacttgcagtctt

SEQ ID NO: 14506 - DNA, 25 bp, Artificial Sequence
  Synthetic Oligonucleotide
cgctctgtcgccgattcacagttct

SEQ ID NO: 14507 - DNA, 25 bp, Artificial Sequence
  Synthetic Oligonucleotide
gtaccgttcgccaagtatgaattat

SEQ ID NO: 14508 - DNA, 25 bp, Artificial Sequence
  Synthetic Oligonucleotide
cctaccgttccctgaaggacattgt

SEQ ID NO: 14509 - DNA, 25 bp, Artificial Sequence
  Synthetic Oligonucleotide
cctaagtcccgctaagtaggtcttt

SEQ ID NO: 14510 - DNA, 25 bp, Artificial Sequence
  Synthetic Oligonucleotide
caaatctcgttcgatagtgattatt

SEQ ID NO: 14511 - DNA, 25 bp, Artificial Sequence
  Synthetic Oligonucleotide
ggaatctacttctgaagtcctttat

SEQ ID NO: 14512 - DNA, 25 bp, Artificial Sequence
  Synthetic Oligonucleotide
gacactcgaccctaggtcctatcat

SEQ ID NO: 14513 - DNA, 25 bp, Artificial Sequence
  Synthetic Oligonucleotide
agactctgcctcgtggtttacttct

SEQ ID NO: 14514 - DNA, 25 bp, Artificial Sequence
  Synthetic Oligonucleotide
gctctgaacacttgggtctctgtct

SEQ ID NO: 14515 - DNA, 25 bp, Artificial Sequence
  Synthetic Oligonucleotide
agtatccgaaacttggttcacatct

SEQ ID NO: 14516 - DNA, 25 bp, Artificial Sequence
  Synthetic Oligonucleotide
atctaggtaactctgttcgagatct

SEQ ID NO: 14517 - DNA, 25 bp, Artificial Sequence
  Synthetic Oligonucleotide
ggtctattctgttctgtgtgaatct

SEQ ID NO: 14518 - DNA, 25 bp, Artificial Sequence
  Synthetic Oligonucleotide
ggagagtttgcgttgtggtctacct

SEQ ID NO: 14519 - DNA, 25 bp, Artificial Sequence
  Synthetic Oligonucleotide
agaagtctgtgaggtctggtcccgt

SEQ ID NO: 14520 - DNA, 25 bp, Artificial Sequence
  Synthetic Oligonucleotide
tgaacacttgggtctctgtcttcgt

SEQ ID NO: 14521 - DNA, 25 bp, Artificial Sequence
  Synthetic Oligonucleotide
aactctgttcgagatctgtcatcgt

SEQ ID NO: 14522 - DNA, 25 bp, Artificial Sequence
  Synthetic Oligonucleotide
acctcgttggacggtcgtctcatct

SEQ ID NO: 14523 - DNA, 25 bp, Artificial Sequence
  Synthetic Oligonucleotide
cggtagtgcgaccgctaccactact

SEQ ID NO: 14524 - DNA, 25 bp, Artificial Sequence
  Synthetic Oligonucleotide
cggactacgtcggtacggcgcacat

SEQ ID NO: 14525 - DNA, 25 bp, Artificial Sequence
  Synthetic Oligonucleotide
ttccgcagtcgtgagaccgcgacat

SEQ ID NO: 14526 - DNA, 25 bp, Artificial Sequence
  Synthetic Oligonucleotide
ctactccagtggatagcgcgtctat

SEQ ID NO: 14527 - DNA, 25 bp, Artificial Sequence
  Synthetic Oligonucleotide
agacgtaccctgactattggttagt

SEQ ID NO: 14528 - DNA, 25 bp, Artificial Sequence
  Synthetic Oligonucleotide
agacgtacccttatgctacgcttat

SEQ ID NO: 14529 - DNA, 25 bp, Artificial Sequence
  Synthetic Oligonucleotide
gactatgactgtgactccacgcttt

SEQ ID NO: 14530 - DNA, 25 bp, Artificial Sequence
  Synthetic Oligonucleotide
agtttggtgtcgcactacccgactt

SEQ ID NO: 14531 - DNA, 25 bp, Artificial Sequence
  Synthetic Oligonucleotide
ggatctttgtgtcctacacttcctt

SEQ ID NO: 14532 - DNA, 25 bp, Artificial Sequence
  Synthetic Oligonucleotide
ggagtgtacttactcttaattcttt

SEQ ID NO: 14533 - DNA, 25 bp, Artificial Sequence
  Synthetic Oligonucleotide
gaacacttatcctaagtagacgttt

SEQ ID NO: 14534 - DNA, 25 bp, Artificial Sequence
  Synthetic Oligonucleotide
tcaaacctaatcttgaatcacggtt

SEQ ID NO: 14535 - DNA, 25 bp, Artificial Sequence
  Synthetic Oligonucleotide
caacagcaactagtggaaccggtct

SEQ ID NO: 14536 - DNA, 25 bp, Artificial Sequence
  Synthetic Oligonucleotide
ccactaggaaaggtagggacacctt

SEQ ID NO: 14537 - DNA, 25 bp, Artificial Sequence
  Synthetic Oligonucleotide
cttcaaagagaagctggagacccat

SEQ ID NO: 14538 - DNA, 25 bp, Artificial Sequence
  Synthetic Oligonucleotide
ttaaaagtgtgaaagaggacctcct

SEQ ID NO: 14539 - DNA, 25 bp, Artificial Sequence
  Synthetic Oligonucleotide
aaaatacaggagaagtgagaccttt

SEQ ID NO: 14540 - DNA, 25 bp, Artificial Sequence
  Synthetic Oligonucleotide
agaaaaactgggtatggctggtact

SEQ ID NO: 14541 - DNA, 25 bp, Artificial Sequence
  Synthetic Oligonucleotide
aggaaaaccgggtacggctggtact

SEQ ID NO: 14542 - DNA, 25 bp, Artificial Sequence
  Synthetic Oligonucleotide
aggaacctccggtacacccggtact

SEQ ID NO: 14543 - DNA, 25 bp, Artificial Sequence
  Synthetic Oligonucleotide
gagtaacatctttcacaccacggtt

SEQ ID NO: 14544 - DNA, 25 bp, Artificial Sequence
  Synthetic Oligonucleotide
gaactacacttactcacgcaatgtt

SEQ ID NO: 14545 - DNA, 25 bp, Artificial Sequence
  Synthetic Oligonucleotide
tgtaaacctatacttcgctctggtt

SEQ ID NO: 14546 - DNA, 25 bp, Artificial Sequence
  Synthetic Oligonucleotide
gtcaaccattgttacggtacaagtt

SEQ ID NO: 14547 - DNA, 25 bp, Artificial Sequence
  Synthetic Oligonucleotide
gaactgagtatttcagtacagatat

SEQ ID NO: 14548 - DNA, 25 bp, Artificial Sequence
  Synthetic Oligonucleotide
acgcatgaatctgtacgtaccgaat

SEQ ID NO: 14549 - DNA, 25 bp, Artificial Sequence
  Synthetic Oligonucleotide
gctactagaactagaagtaccaact

SEQ ID NO: 14550 - DNA, 25 bp, Artificial Sequence
  Synthetic Oligonucleotide
gaactagaagtaccaactaccccgt

SEQ ID NO: 14551 - DNA, 25 bp, Artificial Sequence
  Synthetic Oligonucleotide
cgagagaggagagaagtaccgacct

SEQ ID NO: 14552 - DNA, 25 bp, Artificial Sequence
  Synthetic Oligonucleotide
cagagcgagacagcgggtccgacct

SEQ ID NO: 14553 - DNA, 25 bp, Artificial Sequence
  Synthetic Oligonucleotide
tccgccggacacgtgcgtcggagct

SEQ ID NO: 14554 - DNA, 25 bp, Artificial Sequence
  Synthetic Oligonucleotide
tgggtcgccctgtaccggcaggcct

SEQ ID NO: 14555 - DNA, 25 bp, Artificial Sequence
  Synthetic Oligonucleotide
gggtcccggaacgcgaacgatccgt

SEQ ID NO: 14556 - DNA, 25 bp, Artificial Sequence
  Synthetic Oligonucleotide
gtgcctgttaaagagcgagtcgtct

SEQ ID NO: 14557 - DNA, 25 bp, Artificial Sequence
  Synthetic Oligonucleotide
tgcgatttcaactggtcgactcgtt

SEQ ID NO: 14558 - DNA, 25 bp, Artificial Sequence
  Synthetic Oligonucleotide
cgtcgtgtttacatacttgtccttt

SEQ ID NO: 14559 - DNA, 25 bp, Artificial Sequence
  Synthetic Oligonucleotide
aacgtgagtttatgctcttctttct

SEQ ID NO: 14560 - DNA, 25 bp, Artificial Sequence
  Synthetic Oligonucleotide
agtactcgacagagacccttctttt

SEQ ID NO: 14561 - DNA, 25 bp, Artificial Sequence
  Synthetic Oligonucleotide
cgaatcgtaagaacccaggcttctt

SEQ ID NO: 14562 - DNA, 25 bp, Artificial Sequence
  Synthetic Oligonucleotide
gaaacgaaacgtggtcattcttgtt

SEQ ID NO: 14563 - DNA, 25 bp, Artificial Sequence
  Synthetic Oligonucleotide
aacgacaacttcagcgtcctctgtt

SEQ ID NO: 14564 - DNA, 25 bp, Artificial Sequence
  Synthetic Oligonucleotide
agacgtaatgcccgtacatcgcgtt

SEQ ID NO: 14565 - DNA, 25 bp, Artificial Sequence
  Synthetic Oligonucleotide
gattatgcgtactactgtcgtcgtt

SEQ ID NO: 14566 - DNA, 25 bp, Artificial Sequence
  Synthetic Oligonucleotide
gggttagttgcgttataggtgtgtt

SEQ ID NO: 14567 - DNA, 25 bp, Artificial Sequence
  Synthetic Oligonucleotide
agttgaaatcgcaagtctcagactt

SEQ ID NO: 14568 - DNA, 25 bp, Artificial Sequence
  Synthetic Oligonucleotide
acagaagactgcaagtctgagactt

SEQ ID NO: 14569 - DNA, 25 bp, Artificial Sequence
  Synthetic Oligonucleotide
ccgatgtattcgaagtcgtggtatt

SEQ ID NO: 14570 - DNA, 25 bp, Artificial Sequence
  Synthetic Oligonucleotide
cctaagtctctctagtaagtgtatt

SEQ ID NO: 14571 - DNA, 25 bp, Artificial Sequence
  Synthetic Oligonucleotide
ttccagaacttccatcgagtagatt

SEQ ID NO: 14572 - DNA, 25 bp, Artificial Sequence
  Synthetic Oligonucleotide
gtatccgaaacttggttcacatctt

SEQ ID NO: 14573 - DNA, 25 bp, Artificial Sequence
  Synthetic Oligonucleotide
taactcgaagtagtggttgcatcct

SEQ ID NO: 14574 - DNA, 25 bp, Artificial Sequence
  Synthetic Oligonucleotide
gttcaagaggtgatttcgactctct

SEQ ID NO: 14575 - DNA, 25 bp, Artificial Sequence
  Synthetic Oligonucleotide
tcctaagtagacgttttcgtctcct

SEQ ID NO: 14576 - DNA, 25 bp, Artificial Sequence
  Synthetic Oligonucleotide
gatctcttaggaccttatccgccat

SEQ ID NO: 14577 - DNA, 25 bp, Artificial Sequence
  Synthetic Oligonucleotide
gatttaagtgaatcgtgtcccatat

SEQ ID NO: 14578 - DNA, 25 bp, Artificial Sequence
  Synthetic Oligonucleotide
gttgttgtgtagtagtcatcccatt

SEQ ID NO: 14579 - DNA, 25 bp, Artificial Sequence
  Synthetic Oligonucleotide
ctatcagggagattcttcacctatt

SEQ ID NO: 14580 - DNA, 25 bp, Artificial Sequence
  Synthetic Oligonucleotide
gatctgggaaaatgtctacttagtt

SEQ ID NO: 14581 - DNA, 25 bp, Artificial Sequence
  Synthetic Oligonucleotide
aactatgggaaaagtcgttcacgtt

SEQ ID NO: 14582 - DNA, 25 bp, Artificial Sequence
  Synthetic Oligonucleotide
agagtatccgaaacttggttcacat

SEQ ID NO: 14583 - DNA, 25 bp, Artificial Sequence
  Synthetic Oligonucleotide
gatattacatgtagttcgttcacat

SEQ ID NO: 14584 - DNA, 25 bp, Artificial Sequence
  Synthetic Oligonucleotide
aagatttaagtgaatcgtgtcccat

SEQ ID NO: 14585 - DNA, 25 bp, Artificial Sequence
  Synthetic Oligonucleotide
ccatctcaagtgagtagtccgccat

SEQ ID NO: 14586 - DNA, 25 bp, Artificial Sequence
  Synthetic Oligonucleotide
cattcgaacggtaagtttagtcctt

SEQ ID NO: 14587 - DNA, 25 bp, Artificial Sequence
  Synthetic Oligonucleotide
cttaagacgaagtgttactatcctt

SEQ ID NO: 14588 - DNA, 25 bp, Artificial Sequence
  Synthetic Oligonucleotide
taagacgaagtgttactatccttct

SEQ ID NO: 14589 - DNA, 25 bp, Artificial Sequence
  Synthetic Oligonucleotide
atggagacagtacgaatatccatct

SEQ ID NO: 14590 - DNA, 25 bp, Artificial Sequence
  Synthetic Oligonucleotide
tgggacgaatcgaaggctctagtct

SEQ ID NO: 14591 - DNA, 25 bp, Artificial Sequence
  Synthetic Oligonucleotide
acaggggagattgaggtacctgtct

SEQ ID NO: 14592 - DNA, 25 bp, Artificial Sequence
  Synthetic Oligonucleotide
agttctgaagtaacaggacttgtct

SEQ ID NO: 14593 - DNA, 25 bp, Artificial Sequence
  Synthetic Oligonucleotide
gtcctcgaaggtaaggctactcgct

SEQ ID NO: 14594 - DNA, 25 bp, Artificial Sequence
  Synthetic Oligonucleotide
ggccgggaccggaacggctactcct

SEQ ID NO: 14595 - DNA, 25 bp, Artificial Sequence
  Synthetic Oligonucleotide
gtgccggaaccgtcgaggtcacctt

SEQ ID NO: 14596 - DNA, 25 bp, Artificial Sequence
  Synthetic Oligonucleotide
gtgtcggaaccgtcgcggtcacctt

SEQ ID NO: 14597 - DNA, 25 bp, Artificial Sequence
  Synthetic Oligonucleotide
gtgtcggaaccgtcgtggtcatctt

SEQ ID NO: 14598 - DNA, 25 bp, Artificial Sequence
  Synthetic Oligonucleotide
gtagatgaacggctcgttccgattt

SEQ ID NO: 14599 - DNA, 25 bp, Artificial Sequence
  Synthetic Oligonucleotide
ggtagatctcacttgtcttcctttt

SEQ ID NO: 14600 - DNA, 25 bp, Artificial Sequence
  Synthetic Oligonucleotide
agaccattcccagtcttccgttgtt

SEQ ID NO: 14601 - DNA, 25 bp, Artificial Sequence
  Synthetic Oligonucleotide
aggacttgccatcgtagaactgctg

SEQ ID NO: 14602 - DNA, 25 bp, Artificial Sequence
  Synthetic Oligonucleotide
cagcagttctacgatggcaagtcct

SEQ ID NO: 14603 - DNA, 25 bp, Artificial Sequence
  Synthetic Oligonucleotide
aggacttgccatcgtagaactgctg

SEQ ID NO: 14604 - DNA, 25 bp, Artificial Sequence
  Synthetic Oligonucleotide
cagcagttctacgatggcaagtcct

SEQ ID NO: 14605 - DNA, 25 bp, Artificial Sequence
  Synthetic Oligonucleotide
gatacgtcaacttcttctacagttt

SEQ ID NO: 14606 - DNA, 25 bp, Artificial Sequence
  Synthetic Oligonucleotide
agtcgtcgaaaagctactagtattt

SEQ ID NO: 14607 - DNA, 25 bp, Artificial Sequence
  Synthetic Oligonucleotide
tctagtctgacccaactgagtattt

SEQ ID NO: 14608 - DNA, 25 bp, Artificial Sequence
  Synthetic Oligonucleotide
gttgacttcgtcaaacgaatgtatt

SEQ ID NO: 14609 - DNA, 25 bp, Artificial Sequence
  Synthetic Oligonucleotide
gttctaagtcgtcgaacctatgttt

SEQ ID NO: 14610 - DNA, 25 bp, Artificial Sequence
  Synthetic Oligonucleotide
gtcccagtgtgtgatacagagtttt

SEQ ID NO: 14611 - DNA, 25 bp, Artificial Sequence
  Synthetic Oligonucleotide
gctacctgtgagaagtaccatcttt

SEQ ID NO: 14612 - DNA, 25 bp, Artificial Sequence
  Synthetic Oligonucleotide
ctaccgtacttgacaacagtagttt

SEQ ID NO: 14613 - DNA, 25 bp, Artificial Sequence
  Synthetic Oligonucleotide
attttagtctttaacaacacagttt

SEQ ID NO: 14614 - DNA, 25 bp, Artificial Sequence
  Synthetic Oligonucleotide
cggttacagtttagtacttgcattt

SEQ ID NO: 14615 - DNA, 25 bp, Artificial Sequence
  Synthetic Oligonucleotide
tcgcaagtctcacacttgcagtctt

SEQ ID NO: 14616 - DNA, 25 bp, Artificial Sequence
  Synthetic Oligonucleotide
cgctctgtcgcccattcacagttct

SEQ ID NO: 14617 - DNA, 25 bp, Artificial Sequence
  Synthetic Oligonucleotide
gtaccgttcgcctagtatgaattat

SEQ ID NO: 14618 - DNA, 25 bp, Artificial Sequence
  Synthetic Oligonucleotide
cctaccgttcccagaaggacattgt

SEQ ID NO: 14619 - DNA, 25 bp, Artificial Sequence
  Synthetic Oligonucleotide
cctaagtcccgcaaagtaggtcttt

SEQ ID NO: 14620 - DNA, 25 bp, Artificial Sequence
  Synthetic Oligonucleotide
caaatctcgttccatagtgattatt

SEQ ID NO: 14621 - DNA, 25 bp, Artificial Sequence
  Synthetic Oligonucleotide
ggaatctacttcagaagtcctttat

SEQ ID NO: 14622 - DNA, 25 bp, Artificial Sequence
  Synthetic Oligonucleotide
gacactcgacccaaggtcctatcat

SEQ ID NO: 14623 - DNA, 25 bp, Artificial Sequence
  Synthetic Oligonucleotide
agactctgcctcctggtttacttct

SEQ ID NO: 14624 - DNA, 25 bp, Artificial Sequence
  Synthetic Oligonucleotide
gctctgaacactagggtctctgtct

SEQ ID NO: 14625 - DNA, 25 bp, Artificial Sequence
  Synthetic Oligonucleotide
agtatccgaaacatggttcacatct

SEQ ID NO: 14626 - DNA, 25 bp, Artificial Sequence
  Synthetic Oligonucleotide
atctaggtaactgtgttcgagatct

SEQ ID NO: 14627 - DNA, 25 bp, Artificial Sequence
  Synthetic Oligonucleotide
ggtctattctgtactgtgtgaatct

SEQ ID NO: 14628 - DNA, 25 bp, Artificial Sequence
  Synthetic Oligonucleotide
ggagagtttgcgatgtggtctacct

SEQ ID NO: 14629 - DNA, 25 bp, Artificial Sequence
  Synthetic Oligonucleotide
agaagtctgtgacgtctggtcccgt

SEQ ID NO: 14630 - DNA, 25 bp, Artificial Sequence
  Synthetic Oligonucleotide
tgaacacttgggactctgtcttcgt

SEQ ID NO: 14631 - DNA, 25 bp, Artificial Sequence
  Synthetic Oligonucleotide
aactctgttcgacatctgtcatcgt

SEQ ID NO: 14632 - DNA, 25 bp, Artificial Sequence
  Synthetic Oligonucleotide
acctcgttggaccgtcgtctcatct

SEQ ID NO: 14633 - DNA, 25 bp, Artificial Sequence
  Synthetic Oligonucleotide
cggtagtgcgacggctaccactact

SEQ ID NO: 14634 - DNA, 25 bp, Artificial Sequence
  Synthetic Oligonucleotide
cggactacgtcgctacggcgcacat

SEQ ID NO: 14635 - DNA, 25 bp, Artificial Sequence
  Synthetic Oligonucleotide
ttccgcagtcgtcagaccgcgacat

SEQ ID NO: 14636 - DNA, 25 bp, Artificial Sequence
  Synthetic Oligonucleotide
ctactccagtggttagcgcgtctat

SEQ ID NO: 14637 - DNA, 25 bp, Artificial Sequence
  Synthetic Oligonucleotide
agacgtaccctgtctattggttagt

SEQ ID NO: 14638 - DNA, 25 bp, Artificial Sequence
  Synthetic Oligonucleotide
agacgtacccttttgctacgcttat

SEQ ID NO: 14639 - DNA, 25 bp, Artificial Sequence
  Synthetic Oligonucleotide
gactatgactgtcactccacgcttt

SEQ ID NO: 14640 - DNA, 25 bp, Artificial Sequence
  Synthetic Oligonucleotide
agtttggtgtcggactacccgactt

SEQ ID NO: 14641 - DNA, 25 bp, Artificial Sequence
  Synthetic Oligonucleotide
ggatctttgtgtgctacacttcctt

SEQ ID NO: 14642 - DNA, 25 bp, Artificial Sequence
  Synthetic Oligonucleotide
ggagtgtacttagtcttaattcttt

SEQ ID NO: 14643 - DNA, 25 bp, Artificial Sequence
  Synthetic Oligonucleotide
gaacacttatccaaagtagacgttt

SEQ ID NO: 14644 - DNA, 25 bp, Artificial Sequence
  Synthetic Oligonucleotide
tcaaacctaatcatgaatcacggtt

SEQ ID NO: 14645 - DNA, 25 bp, Artificial Sequence
  Synthetic Oligonucleotide
caacagcaactactggaaccggtct

SEQ ID NO: 14646 - DNA, 25 bp, Artificial Sequence
  Synthetic Oligonucleotide
ccactaggaaagctagggacacctt

SEQ ID NO: 14647 - DNA, 25 bp, Artificial Sequence
  Synthetic Oligonucleotide
cttcaaagagaacctggagacccat

SEQ ID NO: 14648 - DNA, 25 bp, Artificial Sequence
  Synthetic Oligonucleotide
ttaaaagtgtgatagaggacctcct

SEQ ID NO: 14649 - DNA, 25 bp, Artificial Sequence
  Synthetic Oligonucleotide
aaaatacaggagtagtgagaccttt

SEQ ID NO: 14650 - DNA, 25 bp, Artificial Sequence
  Synthetic Oligonucleotide
agaaaaactgggaatggctggtact

SEQ ID NO: 14651 - DNA, 25 bp, Artificial Sequence
  Synthetic Oligonucleotide
aggaaaaccgggaacggctggtact

SEQ ID NO: 14652 - DNA, 25 bp, Artificial Sequence
  Synthetic Oligonucleotide
aggaacctccggaacacccggtact

SEQ ID NO: 14653 - DNA, 25 bp, Artificial Sequence
  Synthetic Oligonucleotide
gagtaacatcttacacaccacggtt

SEQ ID NO: 14654 - DNA, 25 bp, Artificial Sequence
  Synthetic Oligonucleotide
gaactacacttagtcacgcaatgtt

SEQ ID NO: 14655 - DNA, 25 bp, Artificial Sequence
  Synthetic Oligonucleotide
tgtaaacctatagttcgctctggtt

SEQ ID NO: 14656 - DNA, 25 bp, Artificial Sequence
  Synthetic Oligonucleotide
gtcaaccattgtaacggtacaagtt

SEQ ID NO: 14657 - DNA, 25 bp, Artificial Sequence
  Synthetic Oligonucleotide
gaactgagtattacagtacagatat

SEQ ID NO: 14658 - DNA, 25 bp, Artificial Sequence
  Synthetic Oligonucleotide
acgcatgaatctctacgtaccgaat

SEQ ID NO: 14659 - DNA, 25 bp, Artificial Sequence
  Synthetic Oligonucleotide
gctactagaacttgaagtaccaact

SEQ ID NO: 14660 - DNA, 25 bp, Artificial Sequence
  Synthetic Oligonucleotide
gaactagaagtagcaactaccccgt

SEQ ID NO: 14661 - DNA, 25 bp, Artificial Sequence
  Synthetic Oligonucleotide
cgagagaggagacaagtaccgacct

SEQ ID NO: 14662 - DNA, 25 bp, Artificial Sequence
  Synthetic Oligonucleotide
cagagcgagacaccgggtccgacct

SEQ ID NO: 14663 - DNA, 25 bp, Artificial Sequence
  Synthetic Oligonucleotide
tccgccggacacctgcgtcggagct

SEQ ID NO: 14664 - DNA, 25 bp, Artificial Sequence
  Synthetic Oligonucleotide
tgggtcgccctgaaccggcaggcct

SEQ ID NO: 14665 - DNA, 25 bp, Artificial Sequence
  Synthetic Oligonucleotide
gggtcccggaacccgaacgatccgt

SEQ ID NO: 14666 - DNA, 25 bp, Artificial Sequence
  Synthetic Oligonucleotide
gtgcctgttaaacagcgagtcgtct

SEQ ID NO: 14667 - DNA, 25 bp, Artificial Sequence
  Synthetic Oligonucleotide
tgcgatttcaacaggtcgactcgtt

SEQ ID NO: 14668 - DNA, 25 bp, Artificial Sequence
  Synthetic Oligonucleotide
cgtcgtgtttacttacttgtccttt

SEQ ID NO: 14669 - DNA, 25 bp, Artificial Sequence
  Synthetic Oligonucleotide
aacgtgagtttaagctcttctttct

SEQ ID NO: 14670 - DNA, 25 bp, Artificial Sequence
  Synthetic Oligonucleotide
agtactcgacagtgacccttctttt

SEQ ID NO: 14671 - DNA, 25 bp, Artificial Sequence
  Synthetic Oligonucleotide
cgaatcgtaagatcccaggcttctt

SEQ ID NO: 14672 - DNA, 25 bp, Artificial Sequence
  Synthetic Oligonucleotide
gaaacgaaacgtcgtcattcttgtt

SEQ ID NO: 14673 - DNA, 25 bp, Artificial Sequence
  Synthetic Oligonucleotide
aacgacaacttctgcgtcctctgtt

SEQ ID NO: 14674 - DNA, 25 bp, Artificial Sequence
  Synthetic Oligonucleotide
agacgtaatgccggtacatcgcgtt

SEQ ID NO: 14675 - DNA, 25 bp, Artificial Sequence
  Synthetic Oligonucleotide
gattatgcgtacaactgtcgtcgtt

SEQ ID NO: 14676 - DNA, 25 bp, Artificial Sequence
  Synthetic Oligonucleotide
gggttagttgcgatataggtgtgtt

SEQ ID NO: 14677 - DNA, 25 bp, Artificial Sequence
  Synthetic Oligonucleotide
agttgaaatcgctagtctcagactt

SEQ ID NO: 14678 - DNA, 25 bp, Artificial Sequence
  Synthetic Oligonucleotide
acagaagactgctagtctgagactt

SEQ ID NO: 14679 - DNA, 25 bp, Artificial Sequence
  Synthetic Oligonucleotide
ccgatgtattcgtagtcgtggtatt

SEQ ID NO: 14680 - DNA, 25 bp, Artificial Sequence
  Synthetic Oligonucleotide
cctaagtctctcaagtaagtgtatt

SEQ ID NO: 14681 - DNA, 25 bp, Artificial Sequence
  Synthetic Oligonucleotide
ttccagaacttcgatcgagtagatt

SEQ ID NO: 14682 - DNA, 25 bp, Artificial Sequence
  Synthetic Oligonucleotide
gtatccgaaactaggttcacatctt

SEQ ID NO: 14683 - DNA, 25 bp, Artificial Sequence
  Synthetic Oligonucleotide
taactcgaagtactggttgcatcct

SEQ ID NO: 14684 - DNA, 25 bp, Artificial Sequence
  Synthetic Oligonucleotide
gttcaagaggtgttttcgactctct

SEQ ID NO: 14685 - DNA, 25 bp, Artificial Sequence
  Synthetic Oligonucleotide
tcctaagtagaccttttcgtctcct

SEQ ID NO: 14686 - DNA, 25 bp, Artificial Sequence
  Synthetic Oligonucleotide
gatctcttaggagcttatccgccat

SEQ ID NO: 14687 - DNA, 25 bp, Artificial Sequence
  Synthetic Oligonucleotide
gatttaagtgaaacgtgtcccatat

SEQ ID NO: 14688 - DNA, 25 bp, Artificial Sequence
  Synthetic Oligonucleotide
gttgttgtgtagaagtcatcccatt

SEQ ID NO: 14689 - DNA, 25 bp, Artificial Sequence
  Synthetic Oligonucleotide
ctatcagggagaatcttcacctatt

SEQ ID NO: 14690 - DNA, 25 bp, Artificial Sequence
  Synthetic Oligonucleotide
gatctgggaaaaagtctacttagtt

SEQ ID NO: 14691 - DNA, 25 bp, Artificial Sequence
  Synthetic Oligonucleotide
aactatgggaaatgtcgttcacgtt

SEQ ID NO: 14692 - DNA, 25 bp, Artificial Sequence
  Synthetic Oligonucleotide
agagtatccgaatcttggttcacat

SEQ ID NO: 14693 - DNA, 25 bp, Artificial Sequence
  Synthetic Oligonucleotide
gatattacatgttgttcgttcacat

SEQ ID NO: 14694 - DNA, 25 bp, Artificial Sequence
  Synthetic Oligonucleotide
aagatttaagtgtatcgtgtcccat

SEQ ID NO: 14695 - DNA, 25 bp, Artificial Sequence
  Synthetic Oligonucleotide
ccatctcaagtgtgtagtccgccat

SEQ ID NO: 14696 - DNA, 25 bp, Artificial Sequence
  Synthetic Oligonucleotide
cattcgaacggttagtttagtcctt

SEQ ID NO: 14697 - DNA, 25 bp, Artificial Sequence
  Synthetic Oligonucleotide
cttaagacgaagagttactatcctt

SEQ ID NO: 14698 - DNA, 25 bp, Artificial Sequence
  Synthetic Oligonucleotide
taagacgaagtgatactatccttct

SEQ ID NO: 14699 - DNA, 25 bp, Artificial Sequence
  Synthetic Oligonucleotide
atggagacagtaggaatatccatct

SEQ ID NO: 14700 - DNA, 25 bp, Artificial Sequence
  Synthetic Oligonucleotide
tgggacgaatcgtaggctctagtct

SEQ ID NO: 14701 - DNA, 25 bp, Artificial Sequence
  Synthetic Oligonucleotide
acaggggagattcaggtacctgtct

SEQ ID NO: 14702 - DNA, 25 bp, Artificial Sequence
  Synthetic Oligonucleotide
agttctgaagtatcaggacttgtct

SEQ ID NO: 14703 - DNA, 25 bp, Artificial Sequence
  Synthetic Oligonucleotide
gtcctcgaaggttaggctactcgct

SEQ ID NO: 14704 - DNA, 25 bp, Artificial Sequence
  Synthetic Oligonucleotide
ggccgggaccggtacggctactcct

SEQ ID NO: 14705 - DNA, 25 bp, Artificial Sequence
  Synthetic Oligonucleotide
gtgccggaaccgacgaggtcacctt

SEQ ID NO: 14706 - DNA, 25 bp, Artificial Sequence
  Synthetic Oligonucleotide
gtgtcggaaccgacgcggtcacctt

SEQ ID NO: 14707 - DNA, 25 bp, Artificial Sequence
  Synthetic Oligonucleotide
gtgtcggaaccgacgtggtcatctt

SEQ ID NO: 14708 - DNA, 25 bp, Artificial Sequence
  Synthetic Oligonucleotide
gtagatgaacgggtcgttccgattt

SEQ ID NO: 14709 - DNA, 25 bp, Artificial Sequence
  Synthetic Oligonucleotide
ggtagatctcacatgtcttcctttt

SEQ ID NO: 14710 - DNA, 25 bp, Artificial Sequence
  Synthetic Oligonucleotide
agaccattcccactcttccgttgtt

SEQ ID NO: 14711 - DNA, 25 bp, Artificial Sequence
  Synthetic Oligonucleotide
aggacttgccatcgtagaactgctg

SEQ ID NO: 14712 - DNA, 25 bp, Artificial Sequence
  Synthetic Oligonucleotide
cagcagttctacgatggcaagtcct

SEQ ID NO: 14713 - DNA, 25 bp, Artificial Sequence
  Synthetic Oligonucleotide
aggacttgccatcgtagaactgctg

SEQ ID NO: 14714 - DNA, 25 bp, Artificial Sequence
  Synthetic Oligonucleotide
cagcagttctacgatggcaagtcct

SEQ ID NO: 14715 - DNA, 25 bp, Artificial Sequence
  Synthetic Oligonucleotide
cagcagttctacgatggcaagtcct

SEQ ID NO: 14716 - DNA, 25 bp, Artificial Sequence
  Synthetic Oligonucleotide
aggacttgccatcgtagaactgctg

SEQ ID NO: 14717 - DNA, 25 bp, Artificial Sequence
  Synthetic Oligonucleotide
cagcagttctacgatggcaagtcct

SEQ ID NO: 14718 - DNA, 25 bp, Artificial Sequence
  Synthetic Oligonucleotide
aggacttgccatcgtagaactgctg

SEQ ID NO: 14719 - DNA, 25 bp, Artificial Sequence
  Synthetic Oligonucleotide
tatgaacagaccataaacctagttt

SEQ ID NO: 14720 - DNA, 25 bp, Artificial Sequence
  Synthetic Oligonucleotide
gaggacacacataacacgactattt

SEQ ID NO: 14721 - DNA, 25 bp, Artificial Sequence
  Synthetic Oligonucleotide
tgtacgcccactggacgagctattt

SEQ ID NO: 14722 - DNA, 25 bp, Artificial Sequence
  Synthetic Oligonucleotide
tgtctacctccgttacggtttattt

SEQ ID NO: 14723 - DNA, 25 bp, Artificial Sequence
  Synthetic Oligonucleotide
cgtgcttccgagtagtaagttttat

SEQ ID NO: 14724 - DNA, 25 bp, Artificial Sequence
  Synthetic Oligonucleotide
gtgctttctcgattaagtactattt

SEQ ID NO: 14725 - DNA, 25 bp, Artificial Sequence
  Synthetic Oligonucleotide
ggttcttccgtcgtacacatatgtt

SEQ ID NO: 14726 - DNA, 25 bp, Artificial Sequence
  Synthetic Oligonucleotide
gatgtctttcgtacccacagtactt

SEQ ID NO: 14727 - DNA, 25 bp, Artificial Sequence
  Synthetic Oligonucleotide
gtgtatctagtgactaaacttactt

SEQ ID NO: 14728 - DNA, 25 bp, Artificial Sequence
  Synthetic Oligonucleotide
ctgtggtagtttggtctgaattcct

SEQ ID NO: 14729 - DNA, 25 bp, Artificial Sequence
  Synthetic Oligonucleotide
tggagtgtacttactcttaattctt

SEQ ID NO: 14730 - DNA, 25 bp, Artificial Sequence
  Synthetic Oligonucleotide
ggaggagccatatcttaaactctct

SEQ ID NO: 14731 - DNA, 25 bp, Artificial Sequence
  Synthetic Oligonucleotide
gaggaggcctatgctgtagatttct

SEQ ID NO: 14732 - DNA, 25 bp, Artificial Sequence
  Synthetic Oligonucleotide
gagaaagccactgacgtggacattt

SEQ ID NO: 14733 - DNA, 25 bp, Artificial Sequence
  Synthetic Oligonucleotide
aacacagctcccgactgaaagttat

SEQ ID NO: 14734 - DNA, 25 bp, Artificial Sequence
  Synthetic Oligonucleotide
actgagtctaaccaacgtgaaattt

SEQ ID NO: 14735 - DNA, 25 bp, Artificial Sequence
  Synthetic Oligonucleotide
agagtataaaccttactgataattt

SEQ ID NO: 14736 - DNA, 25 bp, Artificial Sequence
  Synthetic Oligonucleotide
cgacgacgattcataatgaaattat

SEQ ID NO: 14737 - DNA, 25 bp, Artificial Sequence
  Synthetic Oligonucleotide
cggtaagcgtcaaagtgacatattt

SEQ ID NO: 14738 - DNA, 25 bp, Artificial Sequence
  Synthetic Oligonucleotide
cggagataacataggctctatagtt

SEQ ID NO: 14739 - DNA, 25 bp, Artificial Sequence
  Synthetic Oligonucleotide
gaagtgttacagtttgatctcagtt

SEQ ID NO: 14740 - DNA, 25 bp, Artificial Sequence
  Synthetic Oligonucleotide
gaagtgttaccggtaattcgaggtt

SEQ ID NO: 14741 - DNA, 25 bp, Artificial Sequence
  Synthetic Oligonucleotide
gaatcgtgtcccatatatcgaagtt

SEQ ID NO: 14742 - DNA, 25 bp, Artificial Sequence
  Synthetic Oligonucleotide
gagaacgtcttcctgttccacatct

SEQ ID NO: 14743 - DNA, 25 bp, Artificial Sequence
  Synthetic Oligonucleotide
agacgaagtctcaggctgccaccct

SEQ ID NO: 14744 - DNA, 25 bp, Artificial Sequence
  Synthetic Oligonucleotide
tgagaatgtgcggcgagccacctct

SEQ ID NO: 14745 - DNA, 25 bp, Artificial Sequence
  Synthetic Oligonucleotide
tgaggatgtgcggcgagccacctct

SEQ ID NO: 14746 - DNA, 25 bp, Artificial Sequence
  Synthetic Oligonucleotide
tagtcgcttgcgacgagccctcgct

SEQ ID NO: 14747 - DNA, 25 bp, Artificial Sequence
  Synthetic Oligonucleotide
tcggctgtagcgacagcgcgaactt

SEQ ID NO: 14748 - DNA, 25 bp, Artificial Sequence
  Synthetic Oligonucleotide
aggtcttagtcgatggcggacttct

SEQ ID NO: 14749 - DNA, 25 bp, Artificial Sequence
  Synthetic Oligonucleotide
tcttgtcgtcgtcgaggtaccgact

SEQ ID NO: 14750 - DNA, 25 bp, Artificial Sequence
  Synthetic Oligonucleotide
gtgttcgtcgttggtaggtactctt

SEQ ID NO: 14751 - DNA, 25 bp, Artificial Sequence
  Synthetic Oligonucleotide
ctgtgtacgtccacggaaacgtctt

SEQ ID NO: 14752 - DNA, 25 bp, Artificial Sequence
  Synthetic Oligonucleotide
tggagagtaccgttcttaaactctt

SEQ ID NO: 14753 - DNA, 25 bp, Artificial Sequence
  Synthetic Oligonucleotide
caagcagtgaccactatcaccactt

SEQ ID NO: 14754 - DNA, 16 bp, Artificial Sequence
  Synthetic Oligonucleotide
gttctacgatggcaag

SEQ ID NO: 14755 - DNA, 16 bp, Artificial Sequence
  Synthetic Oligonucleotide
cttgccatcgtagaac

SEQ ID NO: 14756 - DNA, 25 bp, Artificial Sequence
  Synthetic Oligonucleotide
aacgggcacggtgagagactctcct

SEQ ID NO: 14757 - DNA, 25 bp, Artificial Sequence
  Synthetic Oligonucleotide
cagttgcagtgtgaagtactacctt

SEQ ID NO: 14758 - DNA, 25 bp, Artificial Sequence
  Synthetic Oligonucleotide
cagttgcagtgtgaagtactacctt

SEQ ID NO: 14759 - DNA, 25 bp, Artificial Sequence
  Synthetic Oligonucleotide
gtcaaaccacgtactaagacctctt

SEQ ID NO: 14760 - DNA, 25 bp, Artificial Sequence
  Synthetic Oligonucleotide
aacaactctactacgaaactgtctt

SEQ ID NO: 14761 - DNA, 16 bp, Artificial Sequence
  Synthetic Oligonucleotide
gttctacgatggcaag

SEQ ID NO: 14762 - DNA, 16 bp, Artificial Sequence
  Synthetic Oligonucleotide
cttgccatcgtagaac

SEQ ID NO: 14763 - DNA, 25 bp, Artificial Sequence
  Synthetic Oligonucleotide
cagcagttctacgatggcaagtcct

SEQ ID NO: 14764 - DNA, 25 bp, Artificial Sequence
  Synthetic Oligonucleotide
aggacttgccatcgtagaactgctg

SEQ ID NO: 14765 - DNA, 25 bp, Artificial Sequence
  Synthetic Oligonucleotide
cagcagttctacgatggcaagtcct

SEQ ID NO: 14766 - DNA, 25 bp, Artificial Sequence
  Synthetic Oligonucleotide
aggacttgccatcgtagaactgctg

SEQ ID NO: 14767 - DNA, 25 bp, Artificial Sequence
  Synthetic Oligonucleotide
aggacttgccatcgtagaactgctg

SEQ ID NO: 14768 - DNA, 25 bp, Artificial Sequence
  Synthetic Oligonucleotide
cagcagttctacgatggcaagtcct

SEQ ID NO: 14769 - DNA, 25 bp, Artificial Sequence
  Synthetic Oligonucleotide
aggacttgccatcgtagaactgctg

SEQ ID NO: 14770 - DNA, 25 bp, Artificial Sequence
  Synthetic Oligonucleotide
cagcagttctacgatggcaagtcct

SEQ ID NO: 14771 - DNA, 25 bp, Artificial Sequence
  Synthetic Oligonucleotide
tatgaacagaccttaaacctagttt

SEQ ID NO: 14772 - DNA, 25 bp, Artificial Sequence
  Synthetic Oligonucleotide
gaggacacacattacacgactattt

SEQ ID NO: 14773 - DNA, 25 bp, Artificial Sequence
  Synthetic Oligonucleotide
tgtacgcccactcgacgagctattt

SEQ ID NO: 14774 - DNA, 25 bp, Artificial Sequence
  Synthetic Oligonucleotide
tgtctacctccgatacggtttattt

SEQ ID NO: 14775 - DNA, 25 bp, Artificial Sequence
  Synthetic Oligonucleotide
cgtgcttccgagaagtaagttttat

SEQ ID NO: 14776 - DNA, 25 bp, Artificial Sequence
  Synthetic Oligonucleotide
gtgctttctcgaataagtactattt

SEQ ID NO: 14777 - DNA, 25 bp, Artificial Sequence
  Synthetic Oligonucleotide
ggttcttccgtcctacacatatgtt

SEQ ID NO: 14778 - DNA, 25 bp, Artificial Sequence
  Synthetic Oligonucleotide
gatgtctttcgttcccacagtactt

SEQ ID NO: 14779 - DNA, 25 bp, Artificial Sequence
  Synthetic Oligonucleotide
gtgtatctagtgtctaaacttactt

SEQ ID NO: 14780 - DNA, 25 bp, Artificial Sequence
  Synthetic Oligonucleotide
ctgtggtagtttcgtctgaattcct

SEQ ID NO: 14781 - DNA, 25 bp, Artificial Sequence
  Synthetic Oligonucleotide
tggagtgtactttctcttaattctt

SEQ ID NO: 14782 - DNA, 25 bp, Artificial Sequence
  Synthetic Oligonucleotide
ggaggagccataacttaaactctct

SEQ ID NO: 14783 - DNA, 25 bp, Artificial Sequence
  Synthetic Oligonucleotide
gaggaggcctatcctgtagatttct

SEQ ID NO: 14784 - DNA, 25 bp, Artificial Sequence
  Synthetic Oligonucleotide
gagaaagccactcacgtggacattt

SEQ ID NO: 14785 - DNA, 25 bp, Artificial Sequence
  Synthetic Oligonucleotide
aacacagctccccactgaaagttat

SEQ ID NO: 14786 - DNA, 25 bp, Artificial Sequence
  Synthetic Oligonucleotide
actgagtctaacgaacgtgaaattt

SEQ ID NO: 14787 - DNA, 25 bp, Artificial Sequence
  Synthetic Oligonucleotide
agagtataaaccatactgataattt

SEQ ID NO: 14788 - DNA, 25 bp, Artificial Sequence
  Synthetic Oligonucleotide
cgacgacgattcttaatgaaattat

SEQ ID NO: 14789 - DNA, 25 bp, Artificial Sequence
  Synthetic Oligonucleotide
cggtaagcgtcatagtgacatattt

SEQ ID NO: 14790 - DNA, 25 bp, Artificial Sequence
  Synthetic Oligonucleotide
cggagataacattggctctatagtt

SEQ ID NO: 14791 - DNA, 25 bp, Artificial Sequence
  Synthetic Oligonucleotide
gaagtgttacagattgatctcagtt

SEQ ID NO: 14792 - DNA, 25 bp, Artificial Sequence
  Synthetic Oligonucleotide
gaagtgttaccgctaattcgaggtt

SEQ ID NO: 14793 - DNA, 25 bp, Artificial Sequence
  Synthetic Oligonucleotide
gaatcgtgtcccttatatcgaagtt

SEQ ID NO: 14794 - DNA, 25 bp, Artificial Sequence
  Synthetic Oligonucleotide
gagaacgtcttcgtgttccacatct

SEQ ID NO: 14795 - DNA, 25 bp, Artificial Sequence
  Synthetic Oligonucleotide
agacgaagtctctggctgccaccct

SEQ ID NO: 14796 - DNA, 25 bp, Artificial Sequence
  Synthetic Oligonucleotide
tgagaatgtgcgccgagccacctct

SEQ ID NO: 14797 - DNA, 25 bp, Artificial Sequence
  Synthetic Oligonucleotide
tgaggatgtgcgccgagccacctct

SEQ ID NO: 14798 - DNA, 25 bp, Artificial Sequence
  Synthetic Oligonucleotide
tagtcgcttgcgtcgagccctcgct

SEQ ID NO: 14799 - DNA, 25 bp, Artificial Sequence
  Synthetic Oligonucleotide
tcggctgtagcgtcagcgcgaactt

SEQ ID NO: 14800 - DNA, 25 bp, Artificial Sequence
  Synthetic Oligonucleotide
aggtcttagtcgttggcggacttct

SEQ ID NO: 14801 - DNA, 25 bp, Artificial Sequence
  Synthetic Oligonucleotide
tcttgtcgtcgtggaggtaccgact

SEQ ID NO: 14802 - DNA, 25 bp, Artificial Sequence
  Synthetic Oligonucleotide
gtgttcgtcgttcgtaggtactctt

SEQ ID NO: 14803 - DNA, 25 bp, Artificial Sequence
  Synthetic Oligonucleotide
ctgtgtacgtcctcggaaacgtctt

SEQ ID NO: 14804 - DNA, 25 bp, Artificial Sequence
  Synthetic Oligonucleotide
tggagagtaccgatcttaaactctt

SEQ ID NO: 14805 - DNA, 25 bp, Artificial Sequence
  Synthetic Oligonucleotide
caagcagtgacctctatcaccactt

SEQ ID NO: 14806 - DNA, 18 bp, Artificial Sequence
  Synthetic Oligonucleotide
agttctacgatggcaagt

SEQ ID NO: 14807 - DNA, 18 bp, Artificial Sequence
  Synthetic Oligonucleotide
acttgccatcgtagaact

SEQ ID NO: 14808 - DNA, 25 bp, Artificial Sequence
  Synthetic Oligonucleotide
aacgggcacggtcagagactctcct

SEQ ID NO: 14809 - DNA, 25 bp, Artificial Sequence
  Synthetic Oligonucleotide
cagttgcagtgtcaagtactacctt

SEQ ID NO: 14810 - DNA, 25 bp, Artificial Sequence
  Synthetic Oligonucleotide
cagttgcagtgtcaagtactacctt

SEQ ID NO: 14811 - DNA, 25 bp, Artificial Sequence
  Synthetic Oligonucleotide
gtcaaaccacgttctaagacctctt

SEQ ID NO: 14812 - DNA, 25 bp, Artificial Sequence
  Synthetic Oligonucleotide
aacaactctacttcgaaactgtctt

SEQ ID NO: 14813 - DNA, 18 bp, Artificial Sequence
  Synthetic Oligonucleotide
agttctacgatggcaagt

SEQ ID NO: 14814 - DNA, 18 bp, Artificial Sequence
  Synthetic Oligonucleotide
acttgccatcgtagaact

SEQ ID NO: 14815 - DNA, 25 bp, Artificial Sequence
  Synthetic Oligonucleotide
aggacttgccatcgtagaactgctg

SEQ ID NO: 14816 - DNA, 25 bp, Artificial Sequence
  Synthetic Oligonucleotide
cagcagttctacgatggcaagtcct

SEQ ID NO: 14817 - DNA, 25 bp, Artificial Sequence
  Synthetic Oligonucleotide
aggacttgccatcgtagaactgctg

SEQ ID NO: 14818 - DNA, 25 bp, Artificial Sequence
  Synthetic Oligonucleotide
cagcagttctacgatggcaagtcct

SEQ ID NO: 14819 - DNA, 25 bp, Artificial Sequence
  Synthetic Oligonucleotide
cagcagttctacgatggcaagtcct

SEQ ID NO: 14820 - DNA, 25 bp, Artificial Sequence
  Synthetic Oligonucleotide
aggacttgccatcgtagaactgctg

SEQ ID NO: 14821 - DNA, 25 bp, Artificial Sequence
  Synthetic Oligonucleotide
cagcagttctacgatggcaagtcct

SEQ ID NO: 14822 - DNA, 25 bp, Artificial Sequence
  Synthetic Oligonucleotide
aggacttgccatcgtagaactgctg

SEQ ID NO: 14823 - DNA, 25 bp, Artificial Sequence
  Synthetic Oligonucleotide
aggacttgccatcgtagaactgctg

SEQ ID NO: 14824 - DNA, 25 bp, Artificial Sequence
  Synthetic Oligonucleotide
cagcagttctacgatggcaagtcct

SEQ ID NO: 14825 - DNA, 25 bp, Artificial Sequence
  Synthetic Oligonucleotide
aggacttgccatcgtagaactgctg

SEQ ID NO: 14826 - DNA, 25 bp, Artificial Sequence
  Synthetic Oligonucleotide
cagcagttctacgatggcaagtcct

SEQ ID NO: 14827 - DNA, 25 bp, Artificial Sequence
  Synthetic Oligonucleotide
aggacttgccatcgtagaactgctg

SEQ ID NO: 14828 - DNA, 25 bp, Artificial Sequence
  Synthetic Oligonucleotide
cagcagttctacgatggcaagtcct

SEQ ID NO: 14829 - DNA, 25 bp, Artificial Sequence
  Synthetic Oligonucleotide
aggacttgccatcgtagaactgctg

SEQ ID NO: 14830 - DNA, 25 bp, Artificial Sequence
  Synthetic Oligonucleotide
cagcagttctacgatggcaagtcct

SEQ ID NO: 14831 - DNA, 25 bp, Artificial Sequence
  Synthetic Oligonucleotide
aggacttgccatcgtagaactgctg

SEQ ID NO: 14832 - DNA, 25 bp, Artificial Sequence
  Synthetic Oligonucleotide
cagcagttctacgatggcaagtcct

SEQ ID NO: 14833 - DNA, 25 bp, Artificial Sequence
  Synthetic Oligonucleotide
aggacttgccatcgtagaactgctg

SEQ ID NO: 14834 - DNA, 25 bp, Artificial Sequence
  Synthetic Oligonucleotide
cagcagttctacgatggcaagtcct

SEQ ID NO: 14835 - DNA, 25 bp, Artificial Sequence
  Synthetic Oligonucleotide
aggacttgccatcgtagaactgctg

SEQ ID NO: 14836 - DNA, 25 bp, Artificial Sequence
  Synthetic Oligonucleotide
cagcagttctacgatggcaagtcct

SEQ ID NO: 14837 - DNA, 25 bp, Artificial Sequence
  Synthetic Oligonucleotide
aggacttgccatcgtagaactgctg

SEQ ID NO: 14838 - DNA, 25 bp, Artificial Sequence
  Synthetic Oligonucleotide
cagcagttctacgatggcaagtcct

SEQ ID NO: 14839 - DNA, 25 bp, Artificial Sequence
  Synthetic Oligonucleotide
aggacttgccatcgtagaactgctg

SEQ ID NO: 14840 - DNA, 25 bp, Artificial Sequence
  Synthetic Oligonucleotide
cagcagttctacgatggcaagtcct

SEQ ID NO: 14841 - DNA, 25 bp, Artificial Sequence
  Synthetic Oligonucleotide
aggacttgccatcgtagaactgctg

SEQ ID NO: 14842 - DNA, 25 bp, Artificial Sequence
  Synthetic Oligonucleotide
cagcagttctacgatggcaagtcct

SEQ ID NO: 14843 - DNA, 25 bp, Artificial Sequence
  Synthetic Oligonucleotide
aggacttgccatcgtagaactgctg

SEQ ID NO: 14844 - DNA, 25 bp, Artificial Sequence
  Synthetic Oligonucleotide
cagcagttctacgatggcaagtcct

SEQ ID NO: 14845 - DNA, 25 bp, Artificial Sequence
  Synthetic Oligonucleotide
aggacttgccatcgtagaactgctg

SEQ ID NO: 14846 - DNA, 25 bp, Artificial Sequence
  Synthetic Oligonucleotide
cagcagttctacgatggcaagtcct

SEQ ID NO: 14847 - DNA, 25 bp, Artificial Sequence
  Synthetic Oligonucleotide
aggacttgccatcgtagaactgctg

SEQ ID NO: 14848 - DNA, 25 bp, Artificial Sequence
  Synthetic Oligonucleotide
cagcagttctacgatggcaagtcct

SEQ ID NO: 14849 - DNA, 25 bp, Artificial Sequence
  Synthetic Oligonucleotide
aggacttgccatcgtagaactgctg

SEQ ID NO: 14850 - DNA, 25 bp, Artificial Sequence
  Synthetic Oligonucleotide
cagcagttctacgatggcaagtcct

SEQ ID NO: 14851 - DNA, 25 bp, Artificial Sequence
  Synthetic Oligonucleotide
aggacttgccatcgtagaactgctg

SEQ ID NO: 14852 - DNA, 25 bp, Artificial Sequence
  Synthetic Oligonucleotide
cagcagttctacgatggcaagtcct

SEQ ID NO: 14853 - DNA, 25 bp, Artificial Sequence
  Synthetic Oligonucleotide
aggacttgccatcgtagaactgctg

SEQ ID NO: 14854 - DNA, 25 bp, Artificial Sequence
  Synthetic Oligonucleotide
cagcagttctacgatggcaagtcct

SEQ ID NO: 14855 - DNA, 25 bp, Artificial Sequence
  Synthetic Oligonucleotide
aggacttgccatcgtagaactgctg

SEQ ID NO: 14856 - DNA, 25 bp, Artificial Sequence
  Synthetic Oligonucleotide
cagcagttctacgatggcaagtcct

SEQ ID NO: 14857 - DNA, 25 bp, Artificial Sequence
  Synthetic Oligonucleotide
aggacttgccatcgtagaactgctg

SEQ ID NO: 14858 - DNA, 20 bp, Artificial Sequence
  Synthetic Oligonucleotide
cagttctacgatggcaagtc

SEQ ID NO: 14859 - DNA, 20 bp, Artificial Sequence
  Synthetic Oligonucleotide
gacttgccatcgtagaactg

SEQ ID NO: 14860 - DNA, 25 bp, Artificial Sequence
  Synthetic Oligonucleotide
aggacttgccatcgtagaactgctg

SEQ ID NO: 14861 - DNA, 25 bp, Artificial Sequence
  Synthetic Oligonucleotide
cagcagttctacgatggcaagtcct

SEQ ID NO: 14862 - DNA, 25 bp, Artificial Sequence
  Synthetic Oligonucleotide
aggacttgccatcgtagaactgctg

SEQ ID NO: 14863 - DNA, 25 bp, Artificial Sequence
  Synthetic Oligonucleotide
cagcagttctacgatggcaagtcct

SEQ ID NO: 14864 - DNA, 25 bp, Artificial Sequence
  Synthetic Oligonucleotide
aggacttgccatcgtagaactgctg

SEQ ID NO: 14865 - DNA, 25 bp, Artificial Sequence
  Synthetic Oligonucleotide
cagcagttctacgatggcaagtcct

SEQ ID NO: 14866 - DNA, 25 bp, Artificial Sequence
  Synthetic Oligonucleotide
aggacttgccatcgtagaactgctg

SEQ ID NO: 14867 - DNA, 25 bp, Artificial Sequence
  Synthetic Oligonucleotide
cagcagttctacgatggcaagtcct

SEQ ID NO: 14868 - DNA, 25 bp, Artificial Sequence
  Synthetic Oligonucleotide
aggacttgccatcgtagaactgctg

SEQ ID NO: 14869 - DNA, 25 bp, Artificial Sequence
  Synthetic Oligonucleotide
cagcagttctacgatggcaagtcct

SEQ ID NO: 14870 - DNA, 25 bp, Artificial Sequence
  Synthetic Oligonucleotide
aggacttgccatcgtagaactgctg

SEQ ID NO: 14871 - DNA, 25 bp, Artificial Sequence
  Synthetic Oligonucleotide
cagcagttctacgatggcaagtcct

SEQ ID NO: 14872 - DNA, 25 bp, Artificial Sequence
  Synthetic Oligonucleotide
aggacttgccatcgtagaactgctg

SEQ ID NO: 14873 - DNA, 25 bp, Artificial Sequence
  Synthetic Oligonucleotide
cagcagttctacgatggcaagtcct

SEQ ID NO: 14874 - DNA, 25 bp, Artificial Sequence
  Synthetic Oligonucleotide
aggacttgccatcgtagaactgctg

SEQ ID NO: 14875 - DNA, 25 bp, Artificial Sequence
  Synthetic Oligonucleotide
cagcagttctacgatggcaagtcct

SEQ ID NO: 14876 - DNA, 25 bp, Artificial Sequence
  Synthetic Oligonucleotide
aggacttgccatcgtagaactgctg

SEQ ID NO: 14877 - DNA, 25 bp, Artificial Sequence
  Synthetic Oligonucleotide
cagcagttctacgatggcaagtcct

SEQ ID NO: 14878 - DNA, 25 bp, Artificial Sequence
  Synthetic Oligonucleotide
aggacttgccatcgtagaactgctg

SEQ ID NO: 14879 - DNA, 25 bp, Artificial Sequence
  Synthetic Oligonucleotide
cagcagttctacgatggcaagtcct

SEQ ID NO: 14880 - DNA, 25 bp, Artificial Sequence
  Synthetic Oligonucleotide
aggacttgccatcgtagaactgctg

SEQ ID NO: 14881 - DNA, 25 bp, Artificial Sequence
  Synthetic Oligonucleotide
cagcagttctacgatggcaagtcct

SEQ ID NO: 14882 - DNA, 25 bp, Artificial Sequence
  Synthetic Oligonucleotide
aggacttgccatcgtagaactgctg

SEQ ID NO: 14883 - DNA, 25 bp, Artificial Sequence
  Synthetic Oligonucleotide
cagcagttctacgatggcaagtcct

SEQ ID NO: 14884 - DNA, 25 bp, Artificial Sequence
  Synthetic Oligonucleotide
aggacttgccatcgtagaactgctg

SEQ ID NO: 14885 - DNA, 25 bp, Artificial Sequence
  Synthetic Oligonucleotide
cagcagttctacgatggcaagtcct

SEQ ID NO: 14886 - DNA, 25 bp, Artificial Sequence
  Synthetic Oligonucleotide
aggacttgccatcgtagaactgctg

SEQ ID NO: 14887 - DNA, 25 bp, Artificial Sequence
  Synthetic Oligonucleotide
cagcagttctacgatggcaagtcct

SEQ ID NO: 14888 - DNA, 25 bp, Artificial Sequence
  Synthetic Oligonucleotide
aggacttgccatcgtagaactgctg

SEQ ID NO: 14889 - DNA, 25 bp, Artificial Sequence
  Synthetic Oligonucleotide
cagcagttctacgatggcaagtcct

SEQ ID NO: 14890 - DNA, 25 bp, Artificial Sequence
  Synthetic Oligonucleotide
aggacttgccatcgtagaactgctg

SEQ ID NO: 14891 - DNA, 25 bp, Artificial Sequence
  Synthetic Oligonucleotide
cagcagttctacgatggcaagtcct

SEQ ID NO: 14892 - DNA, 25 bp, Artificial Sequence
  Synthetic Oligonucleotide
aggacttgccatcgtagaactgctg

SEQ ID NO: 14893 - DNA, 25 bp, Artificial Sequence
  Synthetic Oligonucleotide
cagcagttctacgatggcaagtcct

SEQ ID NO: 14894 - DNA, 25 bp, Artificial Sequence
  Synthetic Oligonucleotide
aggacttgccatcgtagaactgctg

SEQ ID NO: 14895 - DNA, 25 bp, Artificial Sequence
  Synthetic Oligonucleotide
cagcagttctacgatggcaagtcct

SEQ ID NO: 14896 - DNA, 25 bp, Artificial Sequence
  Synthetic Oligonucleotide
aggacttgccatcgtagaactgctg

SEQ ID NO: 14897 - DNA, 20 bp, Artificial Sequence
  Synthetic Oligonucleotide
cagttctacgatggcaagtc

SEQ ID NO: 14898 - DNA, 20 bp, Artificial Sequence
  Synthetic Oligonucleotide
gacttgccatcgtagaactg

SEQ ID NO: 14899 - DNA, 25 bp, Artificial Sequence
  Synthetic Oligonucleotide
aggacttgccatcgtagaactgctg

SEQ ID NO: 14900 - DNA, 25 bp, Artificial Sequence
  Synthetic Oligonucleotide
cagcagttctacgatggcaagtcct

SEQ ID NO: 14901 - DNA, 25 bp, Artificial Sequence
  Synthetic Oligonucleotide
aggacttgccatcgtagaactgctg

SEQ ID NO: 14902 - DNA, 25 bp, Artificial Sequence
  Synthetic Oligonucleotide
cagcagttctacgatggcaagtcct

SEQ ID NO: 14903 - DNA, 25 bp, Artificial Sequence
  Synthetic Oligonucleotide
aggacttgccatcgtagaactgctg

SEQ ID NO: 14904 - DNA, 25 bp, Artificial Sequence
  Synthetic Oligonucleotide
cagcagttctacgatggcaagtcct

SEQ ID NO: 14905 - DNA, 25 bp, Artificial Sequence
  Synthetic Oligonucleotide
aggacttgccatcgtagaactgctg

SEQ ID NO: 14906 - DNA, 25 bp, Artificial Sequence
  Synthetic Oligonucleotide
cagcagttctacgatggcaagtcct

SEQ ID NO: 14907 - DNA, 25 bp, Artificial Sequence
  Synthetic Oligonucleotide
aggacttgccatcgtagaactgctg

SEQ ID NO: 14908 - DNA, 25 bp, Artificial Sequence
  Synthetic Oligonucleotide
cagcagttctacgatggcaagtcct

SEQ ID NO: 14909 - DNA, 25 bp, Artificial Sequence
  Synthetic Oligonucleotide
aggacttgccatcgtagaactgctg

SEQ ID NO: 14910 - DNA, 25 bp, Artificial Sequence
  Synthetic Oligonucleotide
cagcagttctacgatggcaagtcct

SEQ ID NO: 14911 - DNA, 25 bp, Artificial Sequence
  Synthetic Oligonucleotide
aggacttgccatcgtagaactgctg

SEQ ID NO: 14912 - DNA, 25 bp, Artificial Sequence
  Synthetic Oligonucleotide
cagcagttctacgatggcaagtcct

SEQ ID NO: 14913 - DNA, 25 bp, Artificial Sequence
  Synthetic Oligonucleotide
aggacttgccatcgtagaactgctg

SEQ ID NO: 14914 - DNA, 25 bp, Artificial Sequence
  Synthetic Oligonucleotide
cagcagttctacgatggcaagtcct

SEQ ID NO: 14915 - DNA, 25 bp, Artificial Sequence
  Synthetic Oligonucleotide
aggacttgccatcgtagaactgctg

SEQ ID NO: 14916 - DNA, 25 bp, Artificial Sequence
  Synthetic Oligonucleotide
cagcagttctacgatggcaagtcct

SEQ ID NO: 14917 - DNA, 25 bp, Artificial Sequence
  Synthetic Oligonucleotide
aggacttgccatcgtagaactgctg

SEQ ID NO: 14918 - DNA, 25 bp, Artificial Sequence
  Synthetic Oligonucleotide
cagcagttctacgatggcaagtcct

SEQ ID NO: 14919 - DNA, 25 bp, Artificial Sequence
  Synthetic Oligonucleotide
aggacttgccatcgtagaactgctg

SEQ ID NO: 14920 - DNA, 25 bp, Artificial Sequence
  Synthetic Oligonucleotide
cagcagttctacgatggcaagtcct

SEQ ID NO: 14921 - DNA, 25 bp, Artificial Sequence
  Synthetic Oligonucleotide
aggacttgccatcgtagaactgctg

SEQ ID NO: 14922 - DNA, 25 bp, Artificial Sequence
  Synthetic Oligonucleotide
cagcagttctacgatggcaagtcct

SEQ ID NO: 14923 - DNA, 25 bp, Artificial Sequence
  Synthetic Oligonucleotide
aggacttgccatcgtagaactgctg

SEQ ID NO: 14924 - DNA, 25 bp, Artificial Sequence
  Synthetic Oligonucleotide
cagcagttctacgatggcaagtcct

SEQ ID NO: 14925 - DNA, 25 bp, Artificial Sequence
  Synthetic Oligonucleotide
aggacttgccatcgtagaactgctg

SEQ ID NO: 14926 - DNA, 25 bp, Artificial Sequence
  Synthetic Oligonucleotide
cagcagttctacgatggcaagtcct

SEQ ID NO: 14927 - DNA, 25 bp, Artificial Sequence
  Synthetic Oligonucleotide
aggacttgccatcgtagaactgctg

SEQ ID NO: 14928 - DNA, 25 bp, Artificial Sequence
  Synthetic Oligonucleotide
cagcagttctacgatggcaagtcct

SEQ ID NO: 14929 - DNA, 25 bp, Artificial Sequence
  Synthetic Oligonucleotide
aggacttgccatcgtagaactgctg

SEQ ID NO: 14930 - DNA, 25 bp, Artificial Sequence
  Synthetic Oligonucleotide
cagcagttctacgatggcaagtcct

SEQ ID NO: 14931 - DNA, 25 bp, Artificial Sequence
  Synthetic Oligonucleotide
aggacttgccatcgtagaactgctg

SEQ ID NO: 14932 - DNA, 25 bp, Artificial Sequence
  Synthetic Oligonucleotide
cagcagttctacgatggcaagtcct

SEQ ID NO: 14933 - DNA, 25 bp, Artificial Sequence
  Synthetic Oligonucleotide
cagcagttctacgatggcaagtcct

SEQ ID NO: 14934 - DNA, 25 bp, Artificial Sequence
  Synthetic Oligonucleotide
aggacttgccatcgtagaactgctg

SEQ ID NO: 14935 - DNA, 25 bp, Artificial Sequence
  Synthetic Oligonucleotide
cagcagttctacgatggcaagtcct

SEQ ID NO: 14936 - DNA, 25 bp, Artificial Sequence
  Synthetic Oligonucleotide
aggacttgccatcgtagaactgctg
